(19) United States
(12) Patent Application Publication
(10) Pub. No.: US 2003/0065157 A1
(43) Pub. Date: Apr. 3, 2003

(54) Genes expressed in lung cancer

(76) Inventor: Amy W. Lasek, Oakland, CA (US)

Correspondence Address: INCYTE GENOMICS, INC., 3160 PORTER DRIVE, PALO ALTO, CA, 94304, US

(21) Appl. No.: 10/116,802

(22) Filed: Apr. 4, 2002

Related U.S. Application Data
(60) Provisional application No. 60/281,593, filed on Apr. 4, 2001.

(51) Int. Cl. C07H 21/02; C07H 21/04

(52) U.S. Cl. 536/23.1

(57) ABSTRACT

The present invention relates to a combination comprising a plurality of cDNAs which are differentially expressed in a respiratory disorder and which may be used in their entirety or in part to diagnose, to stage, to treat, or to monitor the treatment of a subject with a respiratory disorder.

[0001] This application claims benefit of provisional application 60/281,593, filed 4 Apr. 2001.

### FIELD OF THE INVENTION

[0002] The present invention relates to a combination comprising a plurality of cDNAs which are differentially expressed in lung cancer and which may be used entirely or in part to diagnose, to stage, to treat, or to monitor the progression or treatment of lung cancer.

### BACKGROUND OF THE INVENTION

[0003] Lung cancer is the leading cause of cancer death in the United States affecting more than 100,000 men and 50,000 women each year. Nearly 90% of the patients diagnosed with lung cancer are cigarette smokers. Tobacco smoke contains thousands of noxious substances that induce carcinogen metabolizing enzymes and covalent DNA adduct formation in the exposed bronchial epithelium. In nearly 80% of patients diagnosed with lung cancer, metastasis has already occurred. Most commonly lung cancers metastasize to pleura, brain, bone, pericardium, and liver. The decision to treat with surgery, radiation therapy, or chemotherapy is made on the basis of tumor histology, response to growth factors or hormones, and sensitivity to inhibitors or drugs. With current treatments, most patients die within one year of diagnosis. Earlier diagnosis and a systematic approach to identification, staging, and treatment of lung cancer could positively affect patient outcome.

[0004] Lung cancers progress through a series of morphologically distinct stages from hyperplasia to invasive carcinoma. Malignant lung cancers are divided into two groups and four histopathological classes. The Non Small Cell Lung Carcinoma (NSCLC) group accounts for about 70% of all lung cancer cases and includes adenocarcinomas, squamous cell carcinomas, and large cell carcinomas. Adenocarcinomas typically arise in the peripheral airways and often form mucin secreting glands. Squamous cell carcinomas typically arise in proximal airways. The histogenesis of squamous cell carcinomas may be related to chronic inflammation and injury to the bronchial epithelium that leads to squamous metaplasia. The Small Cell Lung Carcinoma (SCLC) group accounts for about 20% of lung cancer cases. SCLCs typically arise in proximal airways and exhibit a number of paraneoplastic syndromes including inappropriate production of adrenocorticotropin and anti-diuretic hormone.

[0005] Lung cancer cells accumulate numerous genetic lesions, many of which are associated with cytologically visible chromosomal aberrations. The high frequency of chromosomal deletions associated with lung cancer may reflect the roles of multiple tumor suppressor loci in the etiology of this disease. Deletion of the short arm of chromosome 3 is found in over 90% of cases and represents one of the earliest genetic lesions leading to lung cancer. Deletions at chromosome arms 9p and 17p are also common. Other frequently observed genetic lesions include overexpression of telomerase, activation of oncogenes such as K-ras and c-myc, and inactivation of tumor suppressor genes such as RB, p53 and CDKN2.

[0006] Genes differentially regulated in lung cancer have been identified by a variety of methods. Using mRNA differential display technology, Manda et al. (1999, Genomics 51:5-14) identified five genes differentially expressed in lung cancer cell lines compared to normal bronchial epithelial cells. Among the known genes, pulmonary surfactant apoprotein A and alpha 2 macroglobulin were down-regulated, and nm23H1 was upregulated. Petersen et al. (2000, Int J Cancer 86:512-517) used suppression subtractive hybridization to identify 552 clones differentially expressed in lung tumor derived cell lines; 205 of these clones represented known genes. Among the known genes, thrombospondin-1, fibronectin, intercellular adhesion molecule 1, and cytokeratins 6 and 18 had been observed previously to be differentially expressed in lung cancers. Wang et al. (2000, Oncogene 19:1519-1528) used a combination of microarray analysis and subtractive hybridization to identify 17 genes differentially overexpresssed in squamous cell carcinoma compared with normal lung epithelium. Keratin isoform 6, KOC, SPRC, IGFb2, connexin 26, plakofillin 1 and cytokeratin 13 were identified among the known genes..

[0007] Array technologies provide a simple way to explore the expression profile of a large number of related or unrelated genes. When an expression profile is examined, arrays provide a platform for examining which genes are tissue-specific, carrying out housekeeping functions, parts of a signaling cascade, or specifically related to a particular genetic predisposition, condition, disease, or disorder. The potential application of gene expression profiling is particularly relevant to improving diagnosis, prognosis, and treatment of disease. For example, both the sequences and the amount of expression can be compared between tissues from subjects with lung cancer and cytologically normal lung tissue.

[0008] The present invention provides for a combination comprising a plurality of cDNAs for use in detecting changes in expression of genes encoding proteins that are associated with lung cancer. The present invention satisfies a need in the art by providing a set of cDNAs that represent genes that are differentially expressed in lung cancers, particularly adenocarcinoma and squamous cell carcinoma, and can be used entirely or in part to diagnose, to stage, to treat, or to monitor the progression or treatment of a subject with lung cancer.

### SUMMARY

[0009] The present invention provides a combination comprising a plurality of cDNAs wherein the cDNAs are SEQ ID NOs:1-519 as presented in the Sequence Listing that are differentially expressed in lung cancers and the complements of SEQ ID NOs:1-519. The invention also provides a combination comprising a plurality of cDNAs wherein the cDNAs are SEQ ID NOs:1-12 that are differentially expressed at least 2.5-fold in lung cancers and the complements of SEQ ID NOs:1-12. The invention further provides a combination comprising a plurality of cDNAs wherein the cDNAs are SEQ ID NOs:13-83 that are differentially expressed at least 2.0-fold in lung cancers and the complements of SEQ ID NOs:13-83. The invention still further provides a combination comprising a plurality of cDNAs wherein the cDNAs are SEQ ID NOs:98, 132, 135, 140, 145, 152, 174, 210, 223, 242, 246, 278, 304, 340, and 490 that are differentially expressed in squamous cell carcinomas thereby distinguishing squamous cell carcinoma from adenocarcinoma and the complements of SEQ ID NOs:98, 132, 135, 140, 145, 152, 174, 210, 223, 242, 246, 278, 304, 340, and 490. In one aspect, a combination is useful to diagnose a respiratory disorder such as lung cancer. In another aspect, a combination is immobilized on a substrate.

[0010] The invention also provides a high throughput method to detect differential expression of one or more of the cDNAs of the combination. The method comprises hybridizing the substrate comprising the combination with the nucleic acids of a sample, thereby forming one or more hybridization complexes, detecting the hybridization complexes, and comparing the hybridization complexes with those of a standard, wherein differences in the size and signal intensity of each hybridization complex indicates differential expression of nucleic acids in the sample. In one aspect, the nucleic acids of the sample are amplified prior to hybridization. In another aspect, the sample is from a subject with lung cancer and differential expression identifies the type of lung cancer or stages the lung cancer.

[0011] The invention provides a high throughput method of screening a library or a plurality of molecules or compounds to identify a ligand. The method comprises combining the substrate comprising the combination with a library or a plurality of molecules or compounds under conditions to allow specific binding and detecting specific binding, thereby identifying a ligand. The library or plurality of molecules or compounds are selected from DNA molecules, enhancers, mimetics, peptide nucleic acids, proteins, repressors, regulatory proteins, RNA molecules, and transcription factors. The invention also provides a method for purifying a ligand, the method comprising combining a cDNA of the invention with a sample under conditions which allow specific binding, recovering the bound cDNA, and separating the cDNA from the ligand, thereby obtaining purified ligand.

[0012] The invention provides an isolated cDNA comprising a nucleic acid selected from SEQ ID NOs:12, 45, 51, 56, 64, 70, 72, 75-83, 344, 346, 375, 376, 377, 402, 406, 407, 412, 419, and 431 as presented in the Sequence Listing. The invention also provides a vector comprising the cDNA, a host cell comprising the vector, and a method for producing a protein comprising culturing the host cell under conditions for the expression of a protein and recovering the protein from the host cell culture.

[0013] The present invention provides a purified protein encoded and produced by a cDNA of the invention. The invention also provides a high-throughput method for using a protein to screen a library or a plurality of molecules or compounds to identify a ligand. The method comprises combining the protein or a portion thereof with the library or plurality of molecules or compounds under conditions to allow specific binding and detecting specific binding, thereby identifying a ligand which specifically binds the protein. The library or plurality of molecules or compounds is selected from agonists, antagonists, antibodies, DNA molecules, small molecule drugs, immunoglobulins, inhibitors, mimetics, peptide nucleic acids, peptides, pharmaceutical agents, proteins, RNA molecules, and ribozymes. In one aspect, an antibody which specifically binds a protein of the invention is selected from a polyclonal antibody, a monoclonal antibody, a chimeric antibody, a recombinant antibody, a humanized antibody, single chain antibodies, a Fab fragment, an F(ab′)₂ fragment, an Fv fragment; and an antibody-peptide fusion protein. The invention further provides a method for using a protein to purify a ligand. The method comprises combining the protein or a portion thereof with a sample under conditions to allow specific binding, recovering the bound protein, and separating the protein from the ligand, thereby obtaining purified ligand. The invention still further provides method for using the protein to produce a polyclonal or a monoclonal antibody. The method for producing a polyclonal antibody comprises immunizing a animal with a protein under conditions to elicit an antibody response, isolating animal antibodies, attaching the protein to a substrate, contacting the substrate with isolated antibodies under conditions to allow specific binding to the protein, dissociating the antibodies from the protein, thereby obtaining purified polyclonal antibodies. The method for preparing a monoclonal antibody comprises immunizing a animal with a protein under conditions to elicit an antibody response, isolating antibody producing cells from the animal, fusing the antibody producing cells with immortalized cells in culture to form monoclonal antibody producing hybridoma cells, culturing the hybridoma cells, and isolating a monoclonal antibody from culture. The method comprises immunizing an animal with the protein or an antigenic determinant thereof under conditions to elicit an antibody response, isolating animal antibodies, and screening the isolated antibodies with the protein to identify an antibody which specifically binds the protein. The invention yet still further provides a method for using the protein to purify antibodies which bind specifically to the protein.

[0014] The invention provides a purified antibody which specifically binds a protein of the invention. The invention also provides a method of using an antibody to detect the expression of a protein in a sample, the method comprising contacting the antibody with a sample under conditions for the formation of an antibody:protein complex and detecting complex formation wherein the formation of the complex indicates the expression of the protein in the sample. In one aspect, complex formation is compared to standards and is diagnostic of a respiratory disorder such as lung cancer. The invention further provides using an antibody to immunopurify a protein comprising combining the antibody with a sample under conditions to allow formation of an antibody:protein complex, and separating the antibody from the protein, thereby obtaining purified protein.

[0015] The invention provides a composition comprising a cDNA, a protein, an antibody, or a ligand which has agonistic or antagonistic activity.

### DESCRIPTION OF THE COMPACT DISC-RECORDABLE (CD-R)

[0016] CD-R 1 is labeled: “PA-0045 US, Copy 1,” was created on Apr. 4, 2002 and contains: the Sequence Listing formatted in plain ASCII text. The file for the Sequence Listing is entitled pa0045.txt, created on Apr. 4, 2002 and is 1.294 KB in size.

[0017] CD-R 2 is an exact copy of CD-R 1. CD-R 2 is labeled: “PA-0045 US, Copy 2,” and was created on Apr. 4, 2002.

[0018] The CD-R labeled as: “PA-0045 US, CRF,” contains the Sequence Listing formatted in plain ASCII text. The file for the Sequence Listing is entitled pa0045us.txt, was created on Apr. 4, 2002 and is 1.294 KB in size.

[0019] The content of the Sequence Listing named above and as described below, submitted in duplicate on two (2) CD-Rs (labeled “PA-0045 US, Copy 1” and “PA-0045 US, Copy 2”), and the CRF (labeled “PA-0045 US, CRF”) containing the Sequence Listing, are incorporated by reference herein, in their entirety.

### DESCRIPTION OF THE SEQUENCE LISTING AND TABLES

[0020] A portion of the disclosure of this patent document contains material that is subject to copyright protection. The copyright owner has no objection to the facsimile reproduction by anyone of the patent document or the patent disclosure, as it appears in the Patent and Trademark Office patent file or records, but otherwise reserves all copyright rights whatsoever.

[0021] The Sequence Listing is a compilation of cDNAs obtained by sequencing and extending clone inserts. Each sequence is identified by a sequence identification number (SEQ ID NO) and by the Incyte template number (INCYTE ID) from which it was obtained.

[0022] Table 1 lists the differential expression of clones representing cDNAs of the present invention on microarrays. Columns 1, 2, and 3 show the SEQ ID NO, TEMPLATE ID, and CLONE ID, respectively. Columns 4 through 10 show the differential expression of each cDNA in a lung tumor sample relative to non-involved lung tissue from the same patient. Differential expression values are in log base 2. Negative values indicate downregulation of the cDNA in lung tumor.

[0023] Table 2 lists the functional annotation of the cDNAs of the present invention. Columns 1, 2, and 3 show the SEQ ID NO, TEMPLATE ID, and CLONE ID, respectively. Columns 3, 4, and 5 show the GenBank hit (GENBANK ID), probability score (E-VALUE), and functional annotation, respectively, as determined by BLAST analysis (version 2.0 using default parameters; Altschul et al. (1997) Nucleic Acids Res 25:3389-3402; Altschul (1993) J Mol Evol 36: 290-300; and Altschul e al. (1990) J Mol Biol 215:403-410) of the cDNA against GenBank (release 121; National Center for Biotechnology Information (NCBI), Bethesda Md.).

[0024] Table 3 shows the region of each cDNA encompassed by the clone present on a microarray and identified as differentially expressed. Columns 1 and 2 show the SEQ ID NO and TEMPLATE ID, respectively. Column 3 shows the CLONE ID and columns 4 and 5 show the first residue (START) and last residue (STOP) encompassed by the clone on the template.

### DESCRIPTION OF THE INVENTION

### Definitions

[0025] “Antibody” refers to intact immunoglobulin molecule, a polyclonal antibody, a monoclonal antibody, a chimeric antibody, a recombinant antibody, a humanized antibody, single chain antibodies, a Fab fragment, an F(ab′)₂ fragment, an Fv fragment; and an antibody-peptide fusion protein.

[0026] “Antigenic determinant” refers to an antigenic or immunogenic epitope, structural feature, or region of an oligopeptide, peptide, or protein which is capable of inducing formation of an antibody which specifically binds the protein. Biological activity is not a prerequisite for immunogenicity.

[0027] “Array” refers to an ordered arrangement of at least two cDNAs, proteins, or antibodies on a substrate. At least one of the cDNAs, proteins, or antibodies represents a control or standard, and the other cDNA, protein, or antibody of diagnostic or therapeutic interest. The arrangement of at least two and up to about 40,000 cDNAs, proteins, or antibodies on the substrate assures that the size and signal intensity of each labeled complex, formed between each cDNA and at least one nucleic acid, each protein and at least one ligand or antibody, or each antibody and at least one protein to which the antibody specifically binds, is individually distinguishable.

[0028] A “combination” refers to at least two cDNAs and up to about 1038 cDNAs selected from SEQ ID NOs:1-519 and the complements thereof.

[0029] “cDNA” refers to an isolated polynucleotide, nucleic acid, or a fragment thereof, that contains from about 400 to about 12,000 nucleotides. It may have originated recombinantly or synthetically, may be double-stranded or single-stranded, represents coding and noncoding 3′ or 5′ sequence, generally lacks introns and may be purified or combined with carbohydrate, lipids, protein or inorganic elements or substances.

[0030] The phrase “cDNA encoding a protein” refers to a nucleic acid whose sequence closely aligns with sequences that encode conserved regions, motifs or domains identified by employing analyses well known in the art. These analyses include BLAST (Basic Local Alignment Search Tool; Altschul, supra; Altschul (1990) supra) and BLAST2 (Altschul (1997) supra) which provide identity within the conserved region. Brenner et al. (1998, Proc Natl Acad Sci 95:6073-6078) who analyzed BLAST for its ability to identify structural homologs by sequence identity found 30% identity is a reliable threshold for sequence alignments of at least 150 residues and 40% is a reasonable threshold for alignments of at least 70 residues (Brenner, page 6076, column 2).

[0031] A “composition” refers to the polynucleotide and a vector or a labeling moiety; a purified protein and a pharmaceutical carrier or a heterologous, labeling, or purification moiety; an antibody and a labeling moiety or pharmaceutical agent; and the like.

[0032] “Derivative” refers to a cDNA or a protein that has been subjected to a chemical modification. Derivatization of a cDNA can involve substitution of a nontraditional base such as queosine or of an analog such as hypoxanthine. These substitutions are well known in the art. Derivatization of a protein involves the replacement of a hydrogen by an acetyl, acyl, alkyl, amino, formyl, or morpholino group. Derivative molecules retain the biological activities of the naturally occurring molecules but may confer advantages such as longer lifespan or enhanced activity.

[0033] “Differential expression” refers to an increased, upregulated or present, or decreased, downregulated or absent, gene expression as detected by the absence, presence, or at least two-fold change in the amount of transcribed messenger RNA or translated protein in a sample.

[0034] “Disorder” refers to conditions, diseases or syndromes of the respiratory system including, but not limited to, lung cancer, particularly adenocarcinomas and squamous cell carcinomas; chronic obstructive pulmonary disease, emphysema, or asthma.

[0035] An “expression profile” is a representation of gene expression in a sample. A nucleic acid expression profile is produced using sequencing, hybridization, or amplification technologies and mRNAs or cDNAs from a sample. A protein expression profile, although time delayed, mirrors the nucleic acid expression profile and uses PAGE, ELISA, FACS, or arrays and labeling moieties or antibodies to detect expression in a sample. The nucleic acids, proteins, or antibodies may be used in solution or attached to a substrate, and their detection is based on methods well known in the art.

[0036] “Fragment” refers to a chain of consecutive nucleotides from about 60 to about 5000 base pairs in length. Fragments may be used in PCR, hybridization or array technologies to identify related nucleic acids and in binding assays to screen for a ligand. Such ligands are useful as therapeutics to regulate replication, transcription or translation.

[0037] A “hybridization complex” is formed between a cDNA and a nucleic acid of a sample when the purines of one molecule hydrogen bond with the pyrimidines of the complementary molecule, e.g., 5′-A-G-T-C-3′ base pairs with 3′-T-C-A-G-5′. The degree of complementarity and the use of nucleotide analogs affect the efficiency and stringency of hybridization reactions.

[0038] “Identity” as applied to sequences, refers to the quantification (usually percentage) of nucleotide or residue matches between at least two sequences aligned using a standardized algorithm such as Smith-Waterman alignment (Smith and Waterman (1981) J Mol Biol 147:195-197), CLUSTALW (Thompson et al. (1994) Nucleic Acids Res 22:4673-4680), or BLAST2 (Altschul (1997) supra). BLAST2 may be used in a standardized and reproducible way to insert gaps in one of the sequences in order to optimize alignment and to achieve a more meaningful comparison between them. “Similarity” as applied to proteins uses the same algorithms but takes into account conservative substitutions of nucleotides or residues.

[0039] “Isolated” or “purified” refers to any molecule or compound that is separated from its natural environment and is from about 60% free to about 90% free from other components with which it is naturally associated.

[0040] “Labeling moiety” refers to any reporter molecule whether a visible or radioactive label, stain or dye that can be attached to or incorporated into a cDNA or protein. Visible labels and dyes include but are not limited to anthocyanins, 8 glucuronidase, BIODIPY, Coomassie blue, Cy3 and Cy5, digoxigenin, FITC, green fluorescent protein, luciferase, spyro red, silver, and the like. Radioactive markers include radioactive forms of hydrogen, iodine, phosphorous, sulfur, and the like.

[0041] “Ligand” refers to any agent, molecule, or compound which will bind specifically to a complementary site on a cDNA molecule or polynucleotide, or to an epitope or a protein. Such ligands stabilize or modulate the activity of polynucleotides or proteins and may be composed of inorganic or organic substances including nucleic acids, proteins, carbohydrates, fats, and lipids.

[0042] “Oligonucleotide” refers a single stranded molecule from about 18 to about 60 nucleotides in length which may be used in hybridization or amplification technologies or in regulation of replication, transcription or translation. Equivalent terms are amplimer, primer, and oligomer.

[0043] “Portion” refers to any part of a protein used for any purpose which retains at least one biological or antigenic characteristic of a native protein, but especially, to an epitope for the screening of ligands or for the production of antibodies.

[0044] “Post-translational modification” of a protein can involve lipidation, glycosylation, phosphorylation, acetylation, racemization, proteolytic cleavage, and the like. These processes may occur synthetically or biochemically. Biochemical modifications will vary by cellular location, cell type, pH, enzymatic milieu, and the like.

[0045] “Probe” refers to a cDNA that hybridizes to at least one nucleic acid molecule in a sample. Where targets are single stranded, probes are complementary single strands. Probes can be labeled for use in hybridization reactions including Southern, northern, in situ, dot blot, array, and like technologies or in screening assays.

[0046] “Protein” refers to a polypeptide or any portion thereof. An “oligopeptide” is an amino acid sequence from about five residues to about 15 residues that is used as part of a fusion protein to produce an antibody.

[0047] “Sample” is used in its broadest sense as containing nucleic acids, proteins, antibodies, and the like. A sample may comprise a bodily fluid such as ascites, blood, lymph, semen, sputum, urine and the like;; the soluble fraction of a cell preparation, or an aliquot of media in which cells were grown; a chromosome, an organelle, or membrane isolated or extracted from a cell; genomic DNA, RNA, or cDNA in solution or bound to a substrate; a cell; a tissue, tissue biopsy or tissue print; buccal cells, skin, a hair or its follicle; and the like.

[0048] “Specific binding” refers to a special and precise interaction between two molecules which is dependent upon their structure, particularly their molecular side groups. Examples include the intercalation of a regulatory protein into the major groove of a DNA molecule, the hydrogen bonding along the backbone between two single stranded nucleic acids, or the binding between an epitope of a protein and an agonist, antagonist, or antibody.

[0049] “Substrate” refers to any rigid or semi-rigid support to which cDNAs or proteins are bound and includes membranes, filters, chips, slides, wafers, fibers, magnetic or nonmagnetic beads, gels, capillaries or other tubing, plates, polymers, and microparticles with a variety of surface forms including wells, trenches, pins, channels and pores.

[0050] A “transcript image” (TI) is a profile of gene transcription activity in a particular tissue at a particular time. TI provides assessment of the relative abundance of expressed polynucleotides in the cDNA libraries of an EST database as described in U.S. Pat. No. 5,840,484, incorporated herein by reference.

[0051] “Variant” refers to molecules that are recognized variations of a cDNA or a protein encoded by the cDNA. Splice variants may be determined by BLAST score, wherein the score is at least 100, and most preferably at least 400. Allelic variants have high percent identity to the cDNAs of the invention and may differ by about three bases per hundred bases. “Single nucleotide polymorphism” (SNP) refers to a change in a single base as a result of a substitution, insertion or deletion. The change may be conservative (purine for purine) or non-conservative (purine to pyrimidine) and may or may not result in a change in an encoded amino acid.

### The Invention

[0052] The present invention provides a combination comprising a plurality of cDNAs, wherein the cDNAs are SEQ ID NOs:1-519 of the Sequence Listing, are differentially expressed in lung tissues, and can be used to detect changes in expression associated with respiratory disorders, particularly adenocarcinomas and squamous cell carcinomas of the lung, chronic obstructive pulmonary disease, emphysema, and asthma. The invention also provides a combination comprising a plurality of cDNAs wherein the cDNAs are SEQ ID NOs:1-12 that are differentially expressed at least 2.5-fold in lung cancers and the complements of SEQ ID NOs:1-12. The invention further provides a combination comprising a plurality of cDNAs wherein the cDNAs are SEQ ID NOs:13-83 that are differentially expressed at least 2.0-fold in lung cancers and the complements of SEQ ID NOs:13-83. The invention still further provides a combination comprising a plurality of cDNAs wherein the cDNAs are SEQ ID NOs:98, 132, 135, 140, 145, 152, 174, 210, 223, 242, 246, 278, 304, 340, and 490 that are differentially expressed in squamous cell carcinoma thereby distinguishing squamous cell carcinoma from adenocarcinoma and the complements of SEQ ID NOs:98, 132, 135, 140, 145, 152, 174, 210, 223, 242, 246, 278, 304, 340, and 490.

[0053] Table 1 shows those cDNAs having the nucleic acid sequences of SEQ ID NOs:1-83 that are regulated more than 2.5-fold in all tumors (log₂>|1.32|). Table 1 also shows the cDNAs having the nucleic acid sequences of SEQ ID NOs:84-519 which are regulated more than two-fold in a majority of tumors. These combinations are useful in the diagnosis of respiratory disorders, especially when immobilized on a substrate. The cDNAs comprising the nucleic acids of SEQ ID NOs:12, 45, 51, 56, 64, 70, 72, 75-83, 344, 346, 375, 376, 377, 402, 406, 407, 412, 419, and 431 are novel cDNAs and are known only by their differential expression in lung tumor tissue. The usefulness of the novel cDNAs exists in their immediate value as diagnostics for respiratory disorders such as lung cancer.

[0054] Table 1 lists each clone representing cDNAs of the present invention that showed differential expression on a microarray. Columns 1, 2, and 3 show the SEQ ID NO, Template ID, and Clone ID, respectively. Columns 4 through 10 show the differential expression of each cDNA in a lung tumor sample relative to non-involved lung tissue from the same patient. Differential expression values are in log base 2. Negative values indicate upregulation of the cDNA in lung tumor. Column 11 shows a two-tailed t-test assuming unequal variance comparing values obtained from squamous cell carcinomas to values obtained from adenocarcinomas. T-test probability scores of less than 0.05 identify genes that show significantly different expression in one carcinoma type relative to the other. The cDNAs of SEQ ID NOs:98, 132, 135, 140, 145, 152, 174, 210, 223, 242, 246, 278, 304, 340, and 490 are of particular importance to distinguish squamous cell carcinomas from adenocarcinomas. Table 2 lists the functional annotation of the cDNAs of the present invention. Columns 1, 2, and 3 show the SEQ ID NO, Template ID, and Clone ID, respectively. Columns 3, 4, and 5 show the GenBank ID, probability score (E-Value), and functional annotation, respectively, as determined by BLAST2 (Altschul_(1997) supra) of the cDNA against GenBank (release 121; NCBI). Table 3 shows the region of each cDNA encompassed by the clone; columns 1, 2, and 3 show the SEQ ID NO, Template ID, and Clone ID respectively; and columns 4 and 5 show the first residue and last residue encompassed by the clone on the template.

[0055] The cDNAs of the invention define a differential expression pattern against which to compare the expression pattern of biopsied and/or in vitro treated lung tissues. The combination may be arranged on a substrate and hybridized with tissues from subjects with other diagnosed respiratory disorders. This will provide information useful for distinguishing among different disorders, or stages of those disorders, and identifying those sequences of highest diagnostic and potential therapeutic value for each disorder. In another embodiment, an additional set of useful cDNAs, such as cDNAs encoding signaling molecules, are arranged on the substrate with the combination. Such combinations may be useful in the elucidation of pathways which are affected in a particular disorder or to identify new, coexpressed, candidate, therapeutic molecules.

[0056] In another embodiment, the combination can be used for large scale genetic or gene expression analysis of a number of nucleic acids. These samples are prepared by methods well known in the art and are derived from mammalian cells or tissues which are in a certain stage of development; have been treated with a known molecule or compound, such as a cytokine, growth factor, drug, or the like; or have been extracted or biopsied from a mammal with a known or unknown condition, disorder, or disease before or after treatment. The sample nucleic acids are hybridized to the combination for the purpose of defining a novel gene profile associated with that developmental stage, treatment, or disorder.

### cDNAs and Their Uses

[0057] cDNAs can be prepared by a variety of synthetic or enzymatic methods well known in the art. cDNAs can be synthesized, in whole or in part, using chemical methods well known in the art (Caruthers et al. (1980) Nucleic Acids Symp Ser (7) 215-233). Alternatively, cDNAs can be produced enzymatically or recombinantly, by in vitro or in vivo transcription.

[0058] Nucleotide analogs can be incorporated into cDNAs by methods well known in the art. The only requirement is that the incorporated analog must base pair with native purines or pyrimidines. For example, 2, 6-diaminopurine can substitute for adenine and form stronger bonds with thymidine than those between adenine and thymidine. A weaker pair is formed when hypoxanthine is substituted for guanine and base pairs with cytosine. Additionally, cDNAs can include nucleotides that have been derivatized chemically or enzymatically.

[0059] cDNAs can be synthesized on a substrate. Synthesis on the surface of a substrate may be accomplished using a chemical coupling procedure and a piezoelectric printing apparatus as described by Baldeschweiler et al. (PCT publication WO95/25 1116). Alternatively, the cDNAs can be synthesized on a substrate surface using a self-addressable electronic device that controls when reagents are added as described by Heller et al. (U.S. Pat. No. 5,605,662). cDNAs can be synthesized directly on a substrate by sequentially dispensing reagents for their synthesis on the substrate surface or by dispensing preformed DNA fragments to the substrate surface. Typical dispensers include a micropipette delivering solution to the substrate with a robotic system to control the position of the micropipette with respect to the substrate. There can be a multiplicity of dispensers so that reagents can be delivered to the reaction regions efficiently.

[0060] cDNAs can be immobilized on a substrate by covalent means such as by chemical bonding procedures or UV irradiation. In one method, a cDNA is bound to a glass surface which has been modified to contain epoxide or aldehyde groups. In another method, a cDNA is placed on a polylysine coated surface and UV cross-linked to it as described by Shalon et al. (WO95/35505). In yet another method, a cDNA is actively transported from a solution to a given position on a substrate by electrical means (Heller, supra). cDNAs do not have to be directly bound to the substrate, but rather can be bound to the substrate through a linker group. The linker groups are typically about 6 to 50 atoms long to provide exposure of the attached cDNA. Preferred linker groups include ethylene glycol oligomers, diamines, diacids and the like. Reactive groups on the substrate surface react with a terminal group of the linker to bind the linker to the substrate. The other terminus of the linker is then bound to the cDNA. Alternatively, polynucleotides, plasmids or cells can be arranged on a filter. In the latter case, cells are lysed, proteins and cellular components degraded, and the DNA is coupled to the filter by UV cross-linking.

[0061] The cDNAs may be used for a variety of purposes. For example, the combination of the invention may be used on an array. The array, in turn, can be used in high-throughput methods for detecting a related polynucleotide in a sample, screening a plurality of molecules or compounds to identify a ligand, diagnosing a respiratory disorder such as chronic obstructive pulmonary disease or lung cancer, or inhibiting or inactivating a therapeutically relevant gene related to the cDNA.

[0062] When the cDNAs of the invention are employed on a microarray, the cDNAs are arranged in an ordered fashion so that each cDNA is present at a specified location. Because the cDNAs are at specified locations on the substrate, the hybridization patterns and intensities, which together create a unique expression profile, can be interpreted in terms of expression levels of particular genes and can be correlated with a particular metabolic process, condition, disorder, disease, stage of disease, or treatment.

### Hybridization

[0063] The cDNAs or fragments or complements thereof may be used in various hybridization technologies. The cDNAs may be labeled using a variety of reporter molecules by either PCR, recombinant, or enzymatic techniques. For example, a commercially available vector containing the cDNA is transcribed in the presence of an appropriate polymerase, such as T7 or SP6 polymerase, and at least one labeled nucleotide. Commercial kits are available for labeling and cleanup of such cDNAs. Radioactive (Amersham Pharmacia Biotech (APB), Piscataway NJ), fluorescent (Qiagen-Operon, Alameda Calif.), and chemiluminescent labeling (Promega, Madison Wis.) are well known in the art.

[0064] A cDNA may represent the complete coding region of an mRNA or be designed or derived from unique regions of the mRNA or genomic molecule, an intron, a 3′ untranslated region, or from a conserved motif. The cDNA is at least 18 contiguous nucleotides in length and is usually single stranded. Such a cDNA may be used under hybridization conditions that allow binding only to an identical sequence, a naturally occurring molecule encoding the same protein, or an allelic variant. Discovery of related human and mammalian sequences may also be accomplished using a pool of degenerate cDNAs and appropriate hybridization conditions. Generally, a cDNA for use in Southern or northern hybridizations may be from about 400 to about 6000 nucleotides long. Such cDNAs have high binding specificity in solution-based or substrate-based hybridizations. An oligonucleotide, a fragment of the cDNA, may be used to detect a polynucleotide in a sample using PCR.

[0065] The stringency of hybridization is determined by G+C content of the cDNA, salt concentration, and temperature. In particular, stringency is increased by reducing the concentration of salt or raising the hybridization temperature. In solutions used for some membrane based hybridizations, addition of an organic solvent such as formamide allows the reaction to occur at a lower temperature. Hybridization may be performed with buffers, such as 5× saline sodium citrate (SSC) with 1% sodium dodecyl sulfate (SDS) at 60° C., that permit the formation of a hybridization complex between nucleic acid sequences that contain some mismatches. Subsequent washes are performed with buffers such as 0.2×SSC with 0.1% SDS at either 45° C. (medium stringency) or 65° C.-68° C. (high stringency). At high stringency, hybridization complexes will remain stable only where the nucleic acids are completely complementary. In some membrane-based hybridizations, preferably 35% or most preferably 50%, formamide may be added to the hybridization solution to reduce the temperature at which hybridization is performed. Background signals may be reduced by the use of detergents such as Sarkosyl or TRITON X-100 (Sigma-Aldrich, St. Louis Mo.) and a blocking agent such as denatured salmon sperm DNA. Selection of components and conditions for hybridization are well known to those skilled in the art and are reviewed in Ausubel et al. (1997, Short Protocols in Molecular Biology, John Wiley & Sons, New York NY, Units 2.8-2.11, 3.18-3.19 and 4-6-4.9).

[0066] Dot-blot, slot-blot, low density and high density arrays are prepared and analyzed using methods known in the art. cDNAs from about 18 consecutive nucleotides to about 6000 consecutive nucleotides in length are contemplated by the invention and used in array technologies. The number of cDNAs on a substrate is at least about five and can be up to about 100,000. The array may be used to monitor the expression level of large numbers of genes simultaneously and to identify genetic variants, mutations, and SNPs. Such information may be used to determine gene function; to understand the genetic basis of a disorder; to diagnose a disorder; and to develop and monitor the activities of therapeutic agents being used to control or cure a disorder. (See, e.g., U.S. Pat. No. 5,474,796; W095/11995; WO95/35505; U.S. Pat. No. 5,605,662; and U.S. Pat. No. 5,958,342.)

### Screening and Purification Assays

[0067] A cDNA may be used to screen a library or a plurality of molecules or compounds for a ligand which specifically binds the cDNA. Ligands may be DNA molecules, RNA molecules, peptide nucleic acid molecules, peptides, proteins such as transcription factors, promoters, enhancers, repressors, and other proteins that regulate replication, transcription, or translation of the polynucleotide in the biological system. The assay involves combining the cDNA or a fragment thereof with the molecules or compounds under conditions that allow specific binding and detecting the bound cDNA to identify at least one ligand that specifically binds the cDNA.

[0068] In one embodiment, the cDNA may be incubated with a library of isolated and purified molecules or compounds and binding activity determined by methods such as a gel-retardation assay (U.S. Pat. No. 6,010,849) or a reticulocyte lysate transcriptional assay. In another embodiment, the cDNA may be incubated with nuclear extracts from biopsied and/or cultured cells and tissues. Specific binding between the cDNA and a molecule or compound in the nuclear extract is initially determined by gel shift assay. Protein binding may be confirmed by raising antibodies against the protein and adding the antibodies to the gel-retardation assay where specific binding will cause a supershift in the assay.

[0069] In another embodiment, the cDNA may be used to purify a molecule or compound using affinity chromatography methods well known in the art. In one embodiment, the cDNA is chemically reacted with cyanogen bromide groups on a polymeric resin or gel. Then a sample is passed over and reacts with or binds to the cDNA. The molecule or compound which is bound to the cDNA may be released from the cDNA by increasing the salt concentration of the flow-through medium and collected.

[0070] The cDNA may be used to purify a ligand from a sample. A method for using a cDNA to purify a ligand would involve combining the cDNA or a fragment thereof with a sample under conditions to allow specific binding, recovering the bound cDNA, and using an appropriate agent to separate the cDNA from the purified ligand.

### Protein Production and Uses

[0071] The cDNAs or fragment thereof may be used to produce purified proteins using recombinant DNA technologies described herein and taught in Ausubel (supra; Units 16.1-16.62). One of the advantages of producing proteins by these procedures is the ability to obtain highly-enriched sources of the proteins thereby simplifying purification procedures.

[0072] The proteins may contain amino acid substitutions, deletions or insertions made on the basis of similarity in polarity, charge, solubility, hydrophobicity, hydrophilicity, and/or the amphipathic nature of the residues involved. Such substitutions may be conservative in nature when the substituted residue has structural or chemical properties similar to the original residue (e.g., replacement of leucine with isoleucine or valine) or they may be nonconservative when the replacement residue is radically different (e.g., a glycine replaced by a tryptophan). Computer programs included in LASERGENE software (DNASTAR, Madison Wis.) and algorithms included in RasMol software (University of Massachusetts, Amherst Mass.) may be used to determine reading frame and which and how many amino acid residues in a particular portion of the protein may be substituted, inserted, or deleted without abolishing biological or immunological activity.

### Expression of Encoded Proteins

[0073] Expression of a particular cDNA may be accomplished by cloning the cDNA into a vector and transforming this vector into a host cell. The cloning vector used for the construction of cDNA libraries in the LIFESEQ databases (Incyte Genomics, Palo Alto Calif.) may also be used for expression. Such vectors usually contain a promoter and a polylinker useful for cloning, priming, and transcription. An exemplary vector may also contain the promoter for β-galactosidase, an amino-terminal methionine and the subsequent seven amino acid residues of β-galactosidase. The vector may be transformed into competent E. coli cells. Induction of the isolated bacterial strain with isopropylthiogalactoside (IPTG) using standard methods will produce a fusion protein that contains an N terminal methionine, the first seven residues of β-galactosidase, about 15 residues of linker, and the protein encoded by the cDNA.

[0074] The cDNA may be shuttled into other vectors known to be useful for expression of protein in specific hosts. Oligonucleotides containing cloning sites and fragments of DNA sufficient to hybridize to stretches at both ends of the cDNA may be chemically synthesized by standard methods. These primers may then be used to amplify the desired fragments by PCR. The fragments may be digested with appropriate restriction enzymes under standard conditions and isolated using gel electrophoresis. Alternatively, similar fragments are produced by digestion of the cDNA with appropriate restriction enzymes and filled in with chemically synthesized oligonucleotides. Fragments of the coding sequence from more than one gene may be ligated together and expressed.

[0075] Signal sequences that dictate secretion of soluble proteins are particularly desirable as component parts of a recombinant sequence. For example, a chimeric protein may be expressed that includes one or more additional purification-facilitating domains. Such domains include, but are not limited to, metal-chelating domains that allow purification on immobilized metals, protein A domains that allow purification on immobilized immunoglobulin, and the domain utilized in the FLAGS extension/affinity purification system (Immunex, Seattle Wash.). The inclusion of a cleavable-linker sequence such as ENTEROKINASEMAX (Invitrogen, San Diego Calif.) between the protein and the purification domain may also be used to recover the protein.

[0076] Suitable host cells may include, but are not limited to, mammalian cells such as Chinese Hamster Ovary (CHO) and human 293 cells, insect cells such as Sf9 cells, plant cells such as Nicotiana tabacum, yeast cells such as Saccharomyces cerevisiae, and bacteria such as E. coli. For each of these cell systems, a useful vector may also include an origin of replication and one or two selectable markers to allow selection in bacteria as well as in a transformed eukaryotic host. Vectors for use in eukaryotic host cells may require the addition of 3′ poly(A) tail if the cDNA lacks poly(A).

[0077] Additionally, the vector may contain promoters or enhancers that increase gene expression. Many promoters are known and used in the art. Most promoters are host specific and exemplary promoters includes SV40 promoters for CHO cells; T7 promoters for bacterial hosts; viral promoters and enhancers for plant cells; and PGH promoters for yeast. Adenoviral vectors with the rous sarcoma virus enhancer or retroviral vectors with long terminal repeat promoters may be used to drive protein expression in mammalian cell lines. Once homogeneous cultures of recombinant cells are obtained, large quantities of secreted soluble protein may be recovered from the conditioned medium and analyzed using chromatographic methods well known in the art. An alternative method for the production of large amounts of secreted protein involves the transformation of mammalian embryos and the recovery of the recombinant protein from milk produced by transgenic cows, goats, sheep, and the like.

[0078] In addition to recombinant production, proteins or portions thereof may be produced manually, using solid-phase techniques (Stewart et al. (1969) Solid-Phase Peptide Synthesis, W H Freeman, San Francisco Calif.; Merrifield (1963) J Am Chem Soc 5:2149-2154), or using machines such as the 431A peptide synthesizer (Applied Biosystems (ABI), Foster City Calif.). Proteins produced by any of the above methods may be used as pharmaceutical compositions to treat disorders associated with null or inadequate expression of the genomic sequence.

### Screening and Purification Assays

[0079] A protein or a portion thereof encoded by the cDNA may be used to screen a library or a plurality of molecules or compounds for a ligand with specific binding affinity or to purify a molecule or compound from a sample. The protein or portion thereof employed in such screening may be free in solution, affixed to an abiotic or biotic substrate, or located intracellularly. For example, viable or fixed prokaryotic host cells that are stably transformed with recombinant nucleic acids that have expressed and positioned a protein on their cell surface can be used in screening assays. The cells are screened against a library or a plurality of ligands and the specificity of binding or formation of complexes between the expressed protein and the ligand may be measured. The ligands can be agonists, antagonists, antibodies, DNA molecules, enhancers, small drug molecules, immunoglobulins, inhibitors, mimetics, peptide nucleic acid molecules, peptides, pharmaceutical agents, proteins, and regulatory proteins, repressors, RNA molecules, ribozymes, and transcription factors, or any other test molecule or compound that specifically binds the protein. An exemplary assay involves combining the mammalian protein or a portion thereof with the molecules or compounds under conditions that allow specific binding and detecting the bound protein to identify at least one ligand that specifically binds the protein.

[0080] This invention also contemplates the use of competitive drug screening assays in which neutralizing antibodies capable of binding the protein specifically compete with a test compound capable of binding to the protein or oligopeptide or fragment thereof. One method for high throughput screening using very small assay volumes and very small amounts of test compound is described in U.S. Pat. No. 5,876,946. Molecules or compounds identified by screening may be used in a model system to evaluate their toxicity, diagnostic, or therapeutic potential.

[0081] The protein may be used to purify a ligand from a sample. A method for using a protein to purify a ligand would involve combining the protein or a portion thereof with a sample under conditions to allow specific binding, recovering the bound protein, and using an appropriate chaotropic agent to separate the protein from the purified ligand.

### Antibody Production and Use

[0082] A protein encoded by a cDNA of the invention may be used to produce specific antibodies. Antibodies may be produced using an protein, polypeptide, peptide or oligopeptide with inherent antigenicity. Methods for producing antibodies include:1) injecting an animal, usually goats, rabbits, or mice, with the protein, or an epitope or oligopeptide thereof, to induce an immune response; 2) engineering hybridomas to produce monoclonal antibodies; 3) inducing in vivo production in the lymphocyte population; or 4) screening libraries of recombinant immunoglobulins. Recombinant immunoglobulins may be produced as taught in U.S. Pat. No. 4,816,567.

[0083] Antibodies produced using the proteins of the invention are useful for the diagnosis of prepathologic disorders as well as the diagnosis of chronic or acute diseases characterized by abnormalities in the expression, amount, or distribution of the protein. A variety of protocols for competitive binding or immunoradiometric assays using either polyclonal or monoclonal antibodies specific for proteins are well known in the art. Immunoassays typically involve the formation of complexes between a protein and its specific binding molecule or compound and the measurement of complex formation. Immunoassays may employ a two-site, monoclonal-based assay that utilizes monoclonal antibodies reactive to two noninterfering epitopes on a specific protein or a competitive binding assay (Pound (1998) Immunochemical Protocols, Humana Press, Totowa N.J.).

[0084] Immunoassay procedures may be used to quantify expression of the protein in cell cultures, in subjects with a particular disorder or in model animal systems under various conditions. Increased or decreased production of proteins as monitored by immunoassay may contribute to knowledge of the cellular activities associated with developmental pathways, engineered conditions or diseases, or treatment efficacy. The quantity of a given protein in a given tissue may be determined by performing immunoassays on freeze-thawed detergent extracts of biological samples and comparing the slope of the binding curves to binding curves generated by purified protein.

### Antibody Arrays

[0085] In an alternative to yeast two hybrid system analysis of proteins, an antibody array can be used to study protein-protein interactions and phosphorylation. A variety of protein ligands are immobilized on a membrane using methods well known in the art. The array is incubated in the presence of cell lysate until protein:antibody complexes are formed. Proteins of interest are identified by exposing the membrane to an antibody specific to the protein of interest. In the alternative, a protein of interest is labeled with digoxigenin (DIG) and exposed to the membrane; then the membrane is exposed to anti-DIG antibody which reveals where the protein of interest forms a complex. The identity of the proteins with which the protein of interest interacts is determined by the position of the protein of interest on the membrane.

[0086] Antibody arrays can also be used for high-throughput screening of recombinant antibodies. Bacteria containing antibody genes are robotically-picked and gridded at high density (up to 18,342 different double-spotted clones) on a filter. Up to 15 antigens at a time are used to screen for clones to identify those that express binding antibody fragments. These antibody arrays can also be used to identify proteins which are differentially expressed in samples (de Wildt et al. (2000) Nature Biotechnol 18:989-94).

### Labeling of Molecules for Assay

[0087] A wide variety of reporter molecules and conjugation techniques are known by those skilled in the art and can be used with cDNAs, polynucleotides, proteins, peptides or antibodies in screening, purification, and diagnostic assays. Synthesis of labeled molecules may be achieved using commercial kits for incorporation of a labeled nucleotide such as ³²P-dCTP, Cy3-dCTP or Cy5-dCTP or amino acid such as ³⁵S-methionine. Polynucleotides, cDNAs, proteins, or antibodies may be directly labeled with a reporter molecule by chemical conjugation to amines, thiols and other groups present in the molecules using reagents such as BIODIPY or FITC (Molecular Probes, Eugene Oreg.).

[0088] The proteins and antibodies may be labeled for purposes of assay by joining them, either covalently or noncovalently, with a reporter molecule that provides for a detectable signal. A wide variety of labels and conjugation techniques are known and have been reported in the scientific and patent literature including, but not limited to U.S. Pat. Nos. 3,817,837; 3,850,752; 3,939,350; 3,996,345; 4,277,437; 4,275,149; and 4,366,241.

### DIAGNOSTICS

[0089] The cDNAs, or fragments thereof, may be used to detect and quantify differential gene expression; absence, presence, or excess expression of mRNAs; or to monitor mRNA levels during therapeutic intervention. Disorders associated with altered expression include chronic obstructive pulmonary disease, lung cancer, emphysema and asthma. These cDNAs can also be utilized as markers of treatment efficacy against the disorders noted above and other disorders, conditions, and diseases over a period ranging from several days to months. The diagnostic assay may use hybridization or amplification technology to compare gene expression in a biological sample from a patient to standard samples in order to detect altered gene expression. Qualitative or quantitative methods for this comparison are well known in the art.

[0090] For example, the cDNA may be labeled by standard methods and added to a biological sample from a patient under conditions for hybridization complex formation. After an incubation period, the sample is washed and the amount of label (or signal) associated with hybridization complexes is quantified and compared with a standard value. If the amount of label in the patient sample is significantly altered in comparison to the standard value, then the presence of the associated condition, disease or disorder is indicated.

[0091] In order to provide a basis for the diagnosis of a condition, disease or disorder associated with gene expression, a normal or standard expression profile is established. This may be accomplished by combining a biological sample taken from normal subjects, either animal or human, with a probe under conditions for hybridization or amplification. Standard hybridization may be quantified by comparing the values obtained using normal subjects with values from an experiment in which a known amount of a purified target sequence is used. Standard values obtained in this manner may be compared with values obtained from samples from patients who are symptomatic for a particular condition, disease, or disorder. Deviation from standard values toward those associated with a particular condition is used to diagnose that condition.

[0092] Such assays may also be used to evaluate the efficacy of a particular therapeutic treatment regimen in animal studies and in clinical trials or to monitor the treatment of an individual patient. Once the presence of a condition is established and a treatment protocol is initiated, diagnostic assays may be repeated on a regular basis to determine if the level of expression in the patient begins to approximate that which is observed in a normal subject. The results obtained from successive assays may be used to show the efficacy of treatment over a period ranging from several days to months.

### Gene Expression Profiles

[0093] A gene expression profile comprises a plurality of cDNAs and a plurality of detectable hybridization complexes, wherein each complex is formed by hybridization of one or more probes to one or more complementary nucleic acids in a sample. The cDNAs of the invention are used as elements on an array to analyze gene expression profiles. In one embodiment, the array is used to monitor the progression of disease. Researchers can assess and catalog the differences in gene expression between healthy and diseased tissues or cells. By analyzing changes in patterns of gene expression, disease can be diagnosed at earlier stages before the patient is symptomatic. The invention can be used to formulate a prognosis and to design a treatment regimen. The invention can also be used to monitor the efficacy of treatment. For treatments with known side effects, the array is employed to improve the treatment regimen. A dosage is established that causes a change in genetic expression patterns indicative of successful treatment. Expression patterns associated with the onset of undesirable side effects are avoided. This approach may be more sensitive and rapid than waiting for the patient to show inadequate improvement, or to manifest side effects, before altering the course of treatment.

[0094] Experimentally, expression profiles can also be evaluated by methods including, but not limited to, differential display by spatial immobilization, gel electrophoresis, genome mismatch scanning, representational discriminate analysis, clustering, and transcript imaging, and protein or antibody arrays. Expression profiles produced by these methods may be used alone or in combination. The correspondence between mRNA and protein expression has been discussed by Zweiger (2001, Transducing the Genome. McGraw-Hill, San Francisco, Calif.) and Glavas et al. (2001, T cell activation upregulates cyclic nucleotide phosphodiesterases 8A1 and 7A3, Proc Natl Acad Sci 98:6319-6342) among others.

[0095] In another embodiment, animal models which mimic a human disease can be used to characterize expression profiles associated with a particular condition, disorder or disease or its treatment. Novel treatment regimens may be tested in these animal models using arrays to establish and then follow expression profiles over time. In addition, arrays can be used with cell cultures or tissues removed from animal models to rapidly screen large numbers of candidate drug molecules, looking for ones that produce an expression profile similar to those of known therapeutic drugs, with the expectation that molecules with the same expression profile will likely have similar therapeutic effects. Thus, the invention provides the means to rapidly determine the molecular mode of action of a drug.

### Assays Using Antibodies

[0096] Antibodies directed against epitopes on a protein encoded by a cDNA of the invention may be used in assays to quantify the amount of protein found in a particular human cell. Such assays include methods utilizing the antibody and a label to detect expression level under normal or disease conditions. The antibodies may be used with or without modification, and labeled by joining them, either covalently or noncovalently, with a labeling moiety.

[0097] Protocols for detecting and measuring protein expression using either polyclonal or monoclonal antibodies are well known in the art. Examples include ELISA, RIA, fluorescent activated cell sorting (FACS), and arrays. Such immunoassays typically involve the formation of complexes between the protein and its specific antibody and the measurement of such complexes.

### THERAPEUTICS

[0098] The cDNAs and fragments thereof can be used in gene therapy. cDNAs can be delivered ex vivo to target cells, such as cells of bone marrow. Once stable integration and transcription and or translation are confirmed, the bone marrow may be reintroduced into the subject. Expression of the protein encoded by the cDNA may correct a disorder associated with mutation of a normal sequence, reduction or loss of an endogenous target protein, or overexpression of an endogenous or mutant protein. Alternatively, cDNAs may be delivered in vivo using vectors such as retrovirus, adenovirus, adeno-associated virus, herpes simplex virus, and bacterial plasmids. Non-viral methods of gene delivery include cationic liposomes, polylysine conjugates, artificial viral envelopes, and direct injection of DNA (Anderson (1998) Nature 392:25-30; Dachs et al. (1997) Oncol Res 9:313-325; Chu et al. (1998) J Mol Med 76(3-4):184-192; Weiss et al. (1999) Cell Mol Life Sci 55(3):334-358; Agrawal (1996) Antisense Therapeutics, Humana Press, Totowa N.J.; and August et al. (1997)Gene Therapy (Advances in Pharmacology, Vol. 40), Academic Press, San Diego Calif.).

[0099] In addition, expression of a particular protein can be regulated through the specific binding of a fragment of a cDNA to a genomic sequence or an mRNA which encodes the protein or directs its transcription or translation. The cDNA can be modified or derivatized to any RNA-like or DNA-like material including peptide nucleic acids, branched nucleic acids, and the like. These sequences can be produced biologically by transforming an appropriate host cell with a vector containing the sequence of interest.

[0100] Molecules which regulate the activity of the cDNA or encoded protein are useful as therapeutics for respiratory disorders including chronic obstructive pulmonary disease, lung cancer, emphysema and asthma. Such molecules include agonists which increase the expression or activity of the polynucleotide or encoded protein, respectively; or antagonists which decrease expression or activity of the polynucleotide or encoded protein, respectively. In one aspect, an antibody which specifically binds the protein may be used directly as an antagonist or indirectly as a delivery mechanism for bringing a pharmaceutical agent to cells or tissues which express the protein.

[0101] Additionally, any of the proteins, or their ligands, or complementary nucleic acid sequences may be administered as pharmaceutical compositions or in combination with other appropriate therapeutic agents. Selection of the appropriate agents for use in combination therapy may be made by one of ordinary skill in the art, according to conventional pharmaceutical principles. The combination of therapeutic agents may act synergistically to affect the treatment or prevention of the conditions and disorders associated with an immune response. Using this approach, one may be able to achieve therapeutic efficacy with lower dosages of each agent, thus reducing the potential for adverse side effects. Further, the therapeutic agents may be combined with pharmaceutically-acceptable carriers including excipients and auxiliaries which facilitate processing of the active compounds into preparations which can be used pharmaceutically. Further details on techniques for formulation and administration used by doctors and pharmacists may be found in the latest edition of Remington's Pharmaceutical Sciences (Mack Publishing, Easton Pa.).

### Model Systems

[0102] Animal models may be used as bioassays where they exhibit a phenotypic response similar to that of humans and where exposure conditions are relevant to human exposures. Mammals are the most common models, and most infectious agent, cancer, drug, and toxicity studies are performed on rodents such as rats or mice because of low cost, availability, lifespan, reproductive potential, and abundant reference literature. Inbred and outbred rodent strains provide a convenient model for investigation of the physiological consequences of underexpression or overexpression of genes of interest and for the development of methods for diagnosis and treatment of diseases. A mammal inbred to overexpress a particular gene (for example, secreted in milk) may also serve as a convenient source of the protein expressed by that gene.

### Transgenic Animal Models

[0103] Transgenic rodents that overexpress or underexpress a gene of interest may be inbred and used to model human diseases or to test therapeutic or toxic agents. (See, e.g., U.S. Pat. No. 5,175,383 and U.S. Pat. No. 5,767,337.) In some cases, the introduced gene may be activated at a specific time in a specific tissue type during fetal or postnatal development. Expression of the transgene is monitored by analysis of phenotype, of tissue-specific mRNA expression, or of serum and tissue protein levels in transgenic animals before, during, and after challenge with experimental drug therapies.

### Embryonic Stem Cells

[0104] Embryonic (ES) stem cells isolated from rodent embryos retain the potential to form embryonic tissues. When ES cells such as the mouse 129/SvJ cell line are placed in a blastocyst from the C57BL/6 mouse strain, they resume normal development and contribute to tissues of the live-born animal. ES cells are preferred for use in the creation of experimental knockout and knockin animals. The method for this process is well known in the art and the steps are:the cDNA is introduced into a vector, the vector is transformed into ES cells, transformed cells are identified and microinjected into mouse cell blastocysts, blastocysts are surgically transferred to pseudopregnant dams. The resulting chimeric progeny are genotyped and bred to produce heterozygous or homozygous strains.

### Knockout Analysis

[0105] In gene knockout analysis, a region of a gene is enzymatically modified to include a non-natural intervening sequence such as the neomycin phosphotransferase gene (neo; Capecchi (1989) Science 244:1288-1292). The modified gene is transformed into cultured ES cells and integrates into the endogenous genome by homologous recombination. The inserted sequence disrupts transcription and translation of the endogenous gene.

### Knockin Analysis

[0106] ES cells can be used to create knockin humanized animals or transgenic animal models of human diseases. With knockin technology, a region of a human gene is injected into animal ES cells, and the human sequence integrates into the animal cell genome. Transgenic progeny or inbred lines are studied and treated with potential pharmaceutical agents to obtain information on the progression and treatment of the analogous human condition.

[0107] As described herein, the uses of the cDNAs, provided in the Sequence Listing of this application, and their encoded proteins are exemplary of known techniques and are not intended to reflect any limitation on their use in any technique that would be known to the person of average skill in the art. Furthermore, the cDNAs provided in this application may be used in molecular biology techniques that have not yet been developed, provided the new techniques rely on properties of nucleotide sequences that are currently known to the person of ordinary skill in the art, e.g., the triplet genetic code, specific base pair interactions, and the like. Likewise, reference to a method may include combining more than one method for obtaining, assembling or expressing cDNAs that will be known to those skilled in the art. It is also to be understood that this invention is not limited to the particular methodology, protocols, and reagents described, as these may vary. It is also understood that the terminology used herein is for the purpose of describing particular embodiments only, and is not intended to limit the scope of the present invention which will be limited only by the appended claims. The examples below are provided to illustrate the subject invention and are not included for the purpose of limiting the invention.

### EXAMPLES

### I Construction of cDNA Libraries

[0108] RNA was purchased from Clontech Laboratories (Palo Alto Calif.) or isolated from various tissues. Some tissues were homogenized and lysed in guanidinium isothiocyanate, while others were homogenized and lysed in phenol or in a suitable mixture of denaturants, such as TRIZOL reagent (Invitrogen). The resulting lysates were centrifuged over CsCl cushions or extracted with chloroform. RNA was precipitated with either isopropanol or ethanol and sodium acetate, or by other routine methods.

[0109] Phenol extraction and precipitation of RNA were repeated as necessary to increase RNA purity. In most cases, RNA was treated with DNAse. For most libraries, poly(A) RNA was isolated using oligo d(T)-coupled paramagnetic particles (Promega), OLIGOTEX latex particles (Qiagen, Valencia Calif.), or an OLIGOTEX mRNA purification kit (Qiagen). Alternatively, poly(A) RNA was isolated directly from tissue lysates using other kits, including the POLY(A)PURE mRNA purification kit (Ambion, Austin Tex.).

[0110] In some cases, Stratagene (La Jolla Calif.) was provided with RNA and constructed the cDNA libraries. Otherwise, cDNA was synthesized and cDNA libraries were constructed with the UNIZAP vector system (Stratagene) or SUPERSCRIPT plasmid system (Invitrogen) using the recommended procedures or similar methods known in the art. (See Ausubel, supra, Units 5.1 through 6.6.) Reverse transcription was initiated using oligo d(T) or random primers. Synthetic oligonucleotide adapters were ligated to double stranded cDNA, and the cDNA was digested with the appropriate restriction enzyme or enzymes. For most libraries, the cDNA was size-selected (300-1000 bp) using SEPHACRYL S1000, SEPHAROSE CL2B, or SEPHAROSE CL4B column chromatography (APB) or preparative agarose gel electrophoresis. cDNAs were ligated into compatible restriction enzyme sites of the polylinker of the pBLUESCRIPT phagemid (Stratagene), pSPORT1 plasmid (Invitrogen), or pINCY plasmid (Incyte Genomics). Recombinant plasmids were transformed into XL1-BLUE, XL1-BLUEMRF, or SOLR competent E. coli cells (Stratagene) or DH5α, DH1OB, or ELECTROMAX DH10B competent E. coli cells (Invitrogen).

[0111] In some cases, libraries were superinfected with a 5× excess of the helper phage, M13K07, according to the method of Vieira et al. (1987, Methods Enzymol 153:3-11) and normalized or subtracted using a methodology adapted from Soares (1994, Proc Natl Acad Sci 91:9228-9232), Swaroop et al. (1991, Nucleic Acids Res 19:1954), and Bonaldo et al. (1996, Genome Research 6:791-806). The modified Soares normalization procedure was utilized to reduce the repetitive cloning of highly expressed, high abundance cDNAs while maintaining the overall sequence complexity of the library. Modification included significantly longer hybridization times which allowed for increased gene discovery rates by biasing the normalized libraries toward those infrequently expressed, low-abundance cDNAs which are poorly represented in a standard transcript image (Soares, supra).

### II Isolation and Sequencing of cDNA Clones

[0112] Plasmids were recovered from host cells by in vivo excision using the UNIZAP vector system (Stratagene) or by cell lysis. Plasmids were purified using one of the following:the Magic or WIZARD MINIPREPS DNA purification system (Promega); the AGTC MINIPREP purification kit (Edge BioSystems, Gaithersburg MD); the QIAVELL 8, QIAWELL 8 Plus, or QIAWELL 8 Ultra plasmid purification systems, or the REAL PREP 96 plasmid purification kit (Qiagen). Following precipitation, plasmids were resuspended in 0.1 ml of distilled water and stored, with or without lyophilization, at 4° C.

[0113] Alternatively, plasmid DNA was amplified from host cell lysates using direct link PCR in a high-throughput format (Rao (1994) Anal Biochem 216:1-14). Host cell lysis and thermal cycling steps were carried out in a single reaction mixture. Samples were processed and stored in 384-well plates, and the concentration of amplified plasmid DNA was quantified fluorometrically using PICOGREEN dye (Molecular Probes) and a FLUOROSKAN II fluorescence scanner (Labsystems Oy, Helsinki, Finland).

[0114] cDNA sequencing reactions were processed using standard methods or high-throughput instrumentation such as the Calif.TALYST 800 thermal cycler (ABI) or the DNA ENGINE thermal cycler (MJ Research, Watertown Mass.) in conjunction with the HYDRA microdispenser (Robbins Scientific, Sunnyvale Calif.) or the MICROLAB 2200 system (Hamilton, Reno Nev.). cDNA sequencing reactions were prepared using reagents provided by APB or supplied in sequencing kits such as the PRISM BIGDYE cycle sequencing kit (ABI). Electrophoretic separation of cDNA sequencing reactions and detection of labeled cDNAs were carried out using the MEGABACE 1000 DNA sequencing system (APB); the PRISM 373 or 377 sequencing systems (ABI) in conjunction with standard protocols and base calling software; or other sequence analysis systems known in the art. Reading frames within the cDNA sequences were identified using standard methods and software (reviewed in Ausubel, supra, Unit 7.7).

### III Extension of cDNA Sequences

[0115] Nucleic acid sequences were extended using the cDNA clones and oligonucleotide primers. One primer was synthesized to initiate 5′ extension of the known fragment, and the other, to initiate 3′ extension of the known fragment. The initial primers were designed using OLIGO primer analysis software (Molecular Biology Insights, Cascade Colo.), or another appropriate program, to be about 22 to 30 nucleotides in length, to have a GC content of about 50% or more, and to anneal to the target sequence at temperatures of about 68° C. to about 72° C. Any stretch of nucleotides which would result in hairpin structures and primer-primer dimerizations was avoided.

[0116] Selected human cDNA libraries were used to extend the sequence. If more than one extension was necessary or desired, additional or nested sets of primers were designed. Preferred libraries are ones that have been size-selected to include larger cDNAs. Also, random primed libraries are preferred because they will contain more sequences with the 5′ and upstream regions of genes. A randomly primed library is particularly useful if an oligo d(T) library does not yield a full-length cDNA.

[0117] High fidelity amplification was obtained by PCR using methods well known in the art. PCR was performed in 96-well plates using the DNA ENGINE thermal cycler (MJ Research). The reaction mix contained DNA template, 200 nmol of each primer, reaction buffer containing Mg²⁺, (NH₄)₂SO₄, and β-mercaptoethanol, Taq DNA polymerase (APB), ELONGASE enzyme (Invitrogen), and Pfu DNA polymerase (Stratagene), with the following parameters for primer pair PCI A and PCI B (Incyte Genomics): Step 1: 94° C., 3 min; Step 2: 94° C., 15 sec; Step 3: 60° C., 1 min; Step 4: 68° C., 2 min; Step 5: Steps 2, 3, and 4 repeated 20 times; Step 6: 68° C., 5 min; Step 7: storage at 4° C. In the alternative, the parameters for primer pair T7 and SK+(Stratagene) were as follows: Step 1: 94° C., 3 min; Step 2: 94° C., 15 sec; Step 3: 57° C., 1 min; Step 4: 68° C., 2 min; Step 5: Steps 2, 3, and 4 repeated 20 times; Step 6: 68° C., 5 min; Step 7: storage at 4° C.

[0118] The concentration of DNA in each well was determined by dispensing 100 μl PICOGREEN reagent (0.25% reagent in 1×TE, v/v; Molecular Probes) and 0.5 μl of undiluted PCR product into each well of an opaque fluorimeter plate (Corning Costar, Acton Mass.) and allowing the DNA to bind to the reagent. The plate was scanned in a FLUOROSKAN II (Labsystems Oy) to measure the fluorescence of the sample and to quantify the concentration of DNA. A 5 μl to 10 μl aliquot of the reaction mixture was analyzed by electrophoresis on a 1% agarose mini-gel to determine which reactions were successful in extending the sequence.

[0119] The extended nucleic acids were desalted and concentrated, transferred to 384-well plates, digested with CviJI cholera virus endonuclease (Molecular Biology Research, Madison Wis.), and sonicated or sheared prior to religation into pUC18 vector (APB). For shotgun sequencing, the digested nucleic acids were separated on low concentration (0.6 to 0.8%) agarose gels, fragments were excised, and agar digested with AGARACE enzyme (Promega). Extended clones were religated using T4 DNA ligase (New England Biolabs, Beverly Mass.) into pUC 18 vector (APB), treated with Pfu DNA polymerase (Stratagene) to fill in restriction site overhangs, and transformed into competent E. coli cells. Transformed cells were selected on antibiotic-containing media, and individual colonies were picked and cultured overnight at 37° C.in 384-well plates in LB/2× carbenicillin liquid media.

[0120] The cells were lysed and DNA was amplified by PCR using Taq DNA polymerase (APB) and Pfu DNA polymerase (Stratagene) with the following parameters: Step 1: 94° C., 3 min; Step 2: 94° C., 15 sec; Step 3: 60° C., 1 min; Step 4: 72° C., 2 min; Step 5: steps 2, 3, and 4 repeated 29 times; Step 6: 72° C., 5 min; Step 7: storage at 4° C. DNA was quantified using PICOGREEN reagent (Molecular Probes) as described above. Samples with low DNA recoveries were reamplified using the same conditions described above. Samples were diluted with 20% dimethylsulfoxide (DMSO; 1:2, v/v), and sequenced using DYENAMIC energy transfer sequencing primers and the DYENAMIC DIRECT cycle sequencing kit (APB) or the PRISM BIGDYE terminator cycle sequencing kit (ABI).

### IV Assembly and Analysis of Sequences

[0121] The nucleic acid sequences of the cDNAs presented in the Sequence Listing may contain occasional sequencing errors and unidentified nucleotides (N) that reflect state-of-the-art technology at the time the cDNA was sequenced. Occasional sequencing errors and Ns may be resolved and SNPs verified either by resequencing the cDNA or using algorithms to compare multiple sequences; these techniques are well known to those skilled in the art who wish to practice the invention. The sequences may be analyzed using a variety of algorithms described in Ausubel (supra, unit 7.7) and in Meyers (1995; Molecular Biology and Biotechnology, Wiley VCH, New York N.Y., pp. 856-853).

[0122] Component nucleotide sequences from chromatograms were subjected to PHRED analysis (Phil Green, University of Washington, Seattle Wash.) and assigned a quality score. The sequences having at least a required quality score were subject to various pre-processing algorithms to eliminate low quality 3′ ends, vector and linker sequences, polyA tails, Alu repeats, mitochondrial and ribosomal sequences, bacterial contamination sequences, and sequences smaller than 50 base pairs. Sequences were screened using the BLOCK 2 program (Incyte Genomics), a motif analysis program based on sequence information contained in the SWISS-PROT and PROSITE databases (Bairoch et al. (1997) Nucleic Acids Res 25:217-221; Attwood et al. (1997) J Chem Inf Comput Sci 37:417-424).

[0123] Processed sequences were subjected to assembly procedures in which the sequences were assigned to bins, one sequence per bin. Sequences in each bin were assembled to produce consensus sequences, referred to as “templates”. Subsequent new sequences were added to existing bins using BLAST (Altschul (supra); Altschul (1993, supra); Karlin et al. (1988) Proc Natl Acad Sci 85:841-845), BLASTn (vers.1.4, WashU), and CROSSMATCH software (Green, supra). Candidate pairs were identified as all BLAST hits having a quality score greater than or equal to 150. Alignments of at least 82% local identity were accepted into the bin. The component sequences from each bin were assembled using PHRAP (Green, supra). Bins with several overlapping component sequences were assembled using DEEP PHRAP (Green, supra).

[0124] Bins were compared against each other, and those having local similarity of at least 82% were combined and reassembled. Reassembled bins having templates of insufficient overlap (less than 95% local identity) were re-split. Assembled templates were also subjected to analysis by STITCHER/EXON MAPPER algorithms which analyzed the probabilities of the presence of splice variants, alternatively spliced exons, splice junctions, differential expression of alternative spliced genes across tissue types, disease states, and the like. These resulting bins were subjected to several rounds of the above assembly procedures to generate the template sequences found in the LIFESEQ GOLD database (Incyte Genomics).

[0125] The assembled templates were annotated using the following procedure. Template sequences were analyzed using BLASTn (vers. 2.0, NCBI) versus GBpri (GenBank vers. 116). “Hits” were defined as an exact match having from 95% local identity over 200 base pairs through 100% local identity over 100 base pairs, or a homolog match having an E-value equal to or greater than 1×10⁻⁸ . (The “E-value” quantifies the statistical probability that a match between two sequences occurred by chance). The hits were subjected to frameshift FAST× versus GENPEPT (GenBank version 109). In this analysis, a homolog match was defined as having an E-value of 1×10⁻⁸. The assembly method used above was described in U.S. Ser. No. 09/276,534, filed Mar. 25, 1999, and the LIFESEQ GOLD user manual (Incyte Genomics).

[0126] Following assembly, template sequences were subjected to motif, BLAST, Hidden Markov Model (HMM; Pearson and Lipman (1988) Proc Natl Acad Sci 85:2444-2448; Smith and Waterman (1981) J Mol Biol 147:195-197), and functional analyses, and categorized in protein hierarchies using methods described in U.S. Ser. No. 08/812,290, filed Mar 6, 1997; U.S. Ser. No. 08/947,845, filed Oct. 9, 1997; U.S. Pat. No. 5,953,727; and U.S. Ser. No. 09/034,807, filed Mar. 4, 1998. Template sequences may be further queried against public databases such as the GenBank rodent, mammalian, vertebrate, eukaryote, prokaryote, and human EST databases.

### V Selection of Sequences, Microarray Preparation and Use

[0127] In most cases, Incyte cDNAs represent template sequences derived from the LIFESEQ GOLD assembled human sequence database (Incyte Genomics). Where more than one clone was available for a particular template, the 5′-most clone in the template was used on the microarray. The HUMAN GENOME GEM series 1-5 microarrays (Incyte Genomics) contain 45,320 array elements which represent 22,632 annotated clusters and 22,688 unannotated clusters. Table 2 shows the GenBank annotations (where available) for SEQ ID NOs:1-519 of this invention as produced by BLAST analysis.

[0128] To construct microarrays, cDNAs were amplified from bacterial cells using primers complementary to vector sequences flanking the cDNA insert. Thirty cycles of PCR increased the initial quantity of cDNAs from 1-2 ng to a final quantity greater than 5 μg. Amplified cDNAs were then purified using SEPHACRYL-400 columns (APB). Purified cDNAs were immobilized on polymer-coated glass slides. Glass microscope slides (Corning, Corning NY) were cleaned by ultrasound in 0.1% SDS and acetone, with extensive distilled water washes between and after treatments. Glass slides were etched in 4% hydrofluoric acid (VWR Scientific Products, West Chester Pa.), washed thoroughly in distilled water, and coated with 0.05% aminopropyl silane (Sigrna-Aldrich) in 95% ethanol. Coated slides were cured in a 110° C.oven. cDNAs were applied to the coated glass substrate using a procedure described in U.S. Pat. No. 5,807,522. One microliter of the cDNA at an average concentration of 100 ng/μl was loaded into the open capillary printing element by a high-speed robotic apparatus which then deposited about 5 nl of cDNA per slide.

[0129] Microarrays were UV-crosslinked using a STRATALINKER UV-crosslinker (Stratagene), and then washed at room temperature once in 0.2% SDS and three times in distilled water. Non-specific binding sites were blocked by incubation of microarrays in 0.2% casein in phosphate buffered saline (Tropix, Bedford Mass.) for 30 minutes at 60° C. followed by washes in 0.2% SDS and distilled water as before.

### VI Preparation of Samples

[0130] Dn5797

[0131] Squamous cell carcinoma and grossly uninvolved tissue were removed from a 73 year old male donor (Roy Castle International Centre for Lung Cancer Research (RCIC), Liverpool, UK). The tumor sample showed 80% overt tumor cells within the tumor and no overtly abnormal cells in uninvolved tissue.

[0132] Dn5800

[0133] Squamous cell carcinoma and grossly uninvolved tissue were removed from a 75 year old female donor (RCIC). The tumor sample showed 70% overt tumor cells within the tumor and no overtly abnormal cells in uninvolved tissue.

[0134] Dn5793

[0135] Squamous cell carcinoma and grossly uninvolved tissue were removed from a 73 year old male donor (RCIC). The tumor sample showed 60% overt tumor cells within the tumor and no overtly abnormal cells in uninvolved tissue.

[0136] Dn5796

[0137] Squamous cell carcinoma and grossly uninvolved tissue were removed from a 66 year old male donor (RCIC). The tumor sample showed 50% overt tumor cells within the tumor and <10% overtly abnormal cells in uninvolved tissue.

[0138] Dn5792

[0139] Squamous cell carcinoma and grossly uninvolved tissue were removed from a 68 year old female donor (RCIC). The tumor sample showed 50% overt tumor cells within the tumor and no overtly abnormal cells in uninvolved tissue.

[0140] Dn5799

[0141] Adenocarcinoma and grossly uninvolved tissue were removed from a 66 year old female donor (RCIC). The tumor sample showed 80% overt tumor cells within the tumor and <5% overtly abnormal cells in uninvolved tissue.

[0142] Dn5792

[0143] Adenocarcinoma and grossly uninvolved tissue were removed from a 71 year old female donor (RCIC). The tumor sample showed 60% overt tumor cells within the tumor and <5% overtly abnormal cells in uninvolved tissue.

[0144] Each of the lung tissue samples was lysed in 1 ml of TRIZOL reagent (Invitrogen). The lysate was vortexed thoroughly, incubated at room temperature for 2-3 minutes, and extracted with 0.5 ml chloroform. The extract was mixed, incubated at room temperature for 5 minutes, and centrifuged at 15,000 rpm for 15 minutes at 4° C. The aqueous layer was collected, and an equal volume of isopropanol was added. Samples were mixed, incubated at room temperature for 10 minutes, and centrifuged at 15,000 rpm for 20 minutes at 4° C. The supernatant was removed, and the RNA pellet was washed with 1 ml of 70% ethanol, centrifuged at 15,000 rpm at 4° C., and resuspended in RNAse-free water. The concentration of the total RNA was determined by measuring the optical density at 260 nm.

[0145] Poly(A) RNA was prepared using an OLIGOTFX mRNA kit (Qiagen) with the following modifications: OLIGOTEX beads were washed in tubes instead of on spin columns, resuspended in elution buffer, and then loaded onto spin columns to recover MRNA. To obtain maximum yield, the mRNA was eluted twice.

[0146] Each poly(A) RNA sample was reverse transcribed using a cDNA synthesis system (Invitrogen) with Not I-T7-VN primers (5′ GCATTAGCGGCCGCGAAATTAATACGACTCACTATAGGGAGAT TTTTTTTTTTTTTTTTVN 3′) and 100 units MMLV RNAseH (−) reverse-transcriptase (Progmega) in the first strand reaction. The resulting cDNA was purified on a CHROMASPIN TE-200 column (Clontech) and lyophilized until dry. The cDNA was amplified 200-400 fold using an AMPLISCRIBE IVT kit (Epicentre Technologies, Madison Wis.) in a procedure modified from U.S. Pat. No. 5,716,785 and U.S. Pat. No. 5,891,636. The amplified RNA was purified on a CHROMASPIN DEPC-200 column (Clontech).

[0147] Amplified RNA was labeled using MMLV reverse-transcriptase, random primer (9mer), 1× first strand buffer, 0.03 units/μl RNAse inhibitor, 500 μM dATP, 500 μM dGTP, 500 μM dTTP, 40 μM dCTP, and 40 μM either dCTP-Cy3 or dCTP-Cy5 (APB). The reverse transcription reaction was performed in a 25 ml volume containing 200 ng poly(A) RNA using the GEMBRIGHT kit (Incyte Genomics). Specific control poly(A) RNAs (YCFR06, YCFR45, YCFR67, YCFR85, YCFR43, YCFR22, YCFR23, YCFR25, YCFR44, YCFR26) were synthesized by in vitro transcription from non-coding yeast genomic DNA (W. Lei, unpublished). As quantitative controls, control mRNAs (YCFR06, YCFR45, YCFR67, and YCFR85) at 0.002 ng, 0.02 ng, 0.2 ng, and 2 ng were diluted into reverse transcription reaction at ratios of 1:100,000, 1:10,000, 1:1000, 1:100 (w/w) to sample mRNA, respectively. To sample differential expression patterns, control mnRNAs (YCFR43, YCFR22, YCFR23, YCFR25, YCFR44, YCFR26) were diluted into reverse transcription reaction at ratios of 1:3, 3:1, 1:10, 10:1, 1:25, 25:1 (w/w) to sample mRNA. Reactions were incubated at 37° C. for 2 hr, treated with 2.5 ml of 0.5M sodium hydroxide, and incubated for 20 minutes at 85° C. to the stop the reaction and degrade the RNA.

[0148] cDNAs were purified using two successive CHROMA SPIN 30 gel filtration spin columns (Clontech). Cy3- and Cy5-labeled reaction samples were combined as described below and ethanol precipitated using 1 ml of glycogen (1 mg/ml), 60 ml sodium acetate, and 300 ml of 100% ethanol. The cDNAs were then dried to completion using a SPEEDVAC system (Savant Instruments, Holbrook N.Y.) and resuspended in 14 ,μl 5× SSC/0.2% SDS.

### VII Hybridization and Detection

[0149] Competitive hybridization reactions compared cDNAs derived from tumor tissue and uninvolved tissue from the same donor. cDNA from all donors except Dn5795 were hybridized to HUMAN GENOME GEMs 1-5. cDNAs from Dn5795 were hybridized to HUMAN GENOME GEM 1.

[0150] Hybridization reactions contained 9 μl of sample mixture containing 0.2 μg each of Cy3 and Cy5 labeled cDNA synthesis products in 5× SSC, 0.2% SDS hybridization buffer. The mixture was heated to 65° C. for 5 minutes and was aliquoted onto the microarray surface and covered with an 1.8 cm² coverslip. The microarrays were transferred to a waterproof chamber having a cavity just slightly larger than a microscope slide. The chamber was kept at 100% humidity internally by the addition of 140 μl of 5× SSC in a corner of the chamber. The chamber containing the microarrays was incubated for about 6.5 hours at 60° C. The microarrays were washed for 10 min at 45° C. in low stringency wash buffer (1× SSC, 0.1% SDS), three times for 10 minutes each at 45° C. in high stringency wash buffer (0.1× SSC), and dried.

[0151] Reporter-labeled hybridization complexes were detected with a microscope equipped with an Innova 70 mixed gas 10 W laser (Coherent, Santa Clara Calif.) capable of generating spectral lines at 488 nm for excitation of Cy3 and at 632 nm for excitation of Cy5. The excitation laser light was focused on the microarray using a 20× microscope objective (Nikon, Melville N.Y.). The slide containing the microarray was placed on a computer-controlled X-Y stage on the microscope and raster-scanned past the objective. The 1.8 cm ×1.8 cm microarray used in the present example was scanned with a resolution of 20 micrometers.

[0152] In two separate scans, the mixed gas multiline laser excited the two fluorophores sequentially. Emitted light was split, based on wavelength, into two photomultiplier tube detectors (PMT R1477; Hamamatsu Photonics Systems, Bridgewater N.J.) corresponding to the two fluorophores. Appropriate filters positioned between the microarray and the photomultiplier tubes were used to filter the signals. The emission maxima of the fluorophores used were 565 nm for Cy3 and 650 nm for Cy5. Each microarray was typically scanned twice, one scan per fluorophore using the appropriate filters at the laser source, although the apparatus was capable of recording the spectra from both fluorophores simultaneously.

[0153] The sensitivity of the scans was calibrated using the signal intensity generated by a cDNA control species. Samples of the calibrating cDNA were separately labeled with the two fluorophores and identical amounts of each were added to the hybridization mixture. A specific location on the microarray contained a complementary DNA sequence, allowing the intensity of the signal at that location to be correlated with a weight ratio of hybridizing species of 1:100,000.

[0154] The output of the photomultiplier tube was digitized using a 12-bit RTI-835H analog-to-digital (A/D) conversion board (Analog Devices, Norwood, Mass.) installed in an IBM-compatible PC computer. The digitized data were displayed as an image where the signal intensity was mapped using a linear 20-color transformation to a pseudocolor scale ranging from blue (low signal) to red (high signal). The data was also analyzed quantitatively. Where two different fluorophores were excited and measured simultaneously, the data were first corrected for optical crosstalk (due to overlapping emission spectra) between the fluorophores using each fluorophore's emission spectrum.

[0155] A grid was superimposed over the fluorescence signal image such that the signal from each spot was centered in each element of the grid. The fluorescence signal within each element was then integrated to obtain a numerical value corresponding to the average intensity of the signal. The software used for signal analysis was the GEMTOOLS gene expression analysis program (Incyte Genomics). Significance was defined as signal to background ratio exceeding 2× and area hybridization exceeding 40%.

### VIII Data Analysis and Results

[0156] Array elements that exhibited a 2-fold or greater change in expression at one or more time points, a signal intensity over 250 units, a signal-to-background ratio of at least 2.5, and an element spot size of at least 40% were identified as differentially expressed using the GEMTOOLS program (Incyte Genomics). Differential expression values are in log base 2 scale. The cDNAs that were differentially expressed are shown in Table 1 and are identified by SEQ ID NO, Template ID, and Clone ID. Negative values represent upregulation in tumor tissue.

### IX Further Characterization of Differentially Expressed cDNAs and Proteins

[0157] Clones were aligned against the LIFESEQ GOLD 5.1 database (January 2001 EST data release; Incyte Genomics) using BLAST analysis and an Incyte template was chosen for each clone. The template was aligned against GenBank database using BLAST analysis to acquire annotation. The nucleotide sequences were translated into amino acid sequences which were aligned against GenPept and other protein databases to acquire annotation and characterization, i.e., structural motifs. The cDNAs that were differentially expressed are shown in Table 2 and are identified by SEQ ID NO, Template ID, Clone ID, and by the description associated with at least a fragment of a polynucleotide found in GenBank. The descriptions were obtained using the sequences of the Sequence Listing and BLAST analysis. Different templates identified in Table 2 may share an identical GenBank annotation. These templates represent related homologs or splice variants. Templates with no similarity to a sequence in the GenBank database are identified in Table 2 as “Incyte Unique”.

[0158] Percent sequence identity can be determined electronically for two or more amino acid or nucleic acid sequences using the MEGALIGN program, a component of LASERGENE software (DNASTAR). The percent identity between two amino acid sequences is calculated by dividing the length of sequence A, minus the number of gap residues in sequence A, minus the number of gap residues in sequence B, into the sum of the residue matches between sequence A and sequence B, times one hundred. Gaps of low or of no homology between the two amino acid sequences are not included in determining percentage identity.

[0159] Sequences with conserved protein motifs may be searched using the BLOCKS search program. This program analyses sequence information contained in the SWISSPROT and PROSITE databases and is useful for determining the classification of uncharacterized proteins translated from genomic or cDNA sequences (Bairoch, supra; Attwood, supra). PROSITE database is a useful source for identifying functional or structural domains that are not detected using motifs due to extreme sequence divergence. Using weight matrices, these domains are calibrated against the SWISSPROT database to obtain a measure of the chance distribution of the matches.

[0160] The PRINTS database can be searched using the BLIMPS search program to obtain protein family “fingerprints”. The PRINTS database complements the PROSITE database by exploiting groups of conserved motifs within sequence alignments to build characteristic signatures of different protein families. For both BLOCKS and PRINTS analyses, the cutoff scores for local similarity were: >1300=strong, 1000-1300=suggestive; for global similarity were: p<exp-3; and for strength (degree of correlation) were: >1300=strong, 1000-1300=weak. Pfam is a large collection of multiple sequence alignments and hidden Markov models covering many common protein domains. Version 5.5 of Pfam (September 2000) contains alignments and models for 2478 protein families, based on the SWISSPROT 38 and SP-TrEMBL 11 protein sequence databases.

### X Other Hybridization Technologies and Analyses

[0161] Other hybridization technologies utilize a variety of substrates such as nylon membranes, capillary tubes, etc. Arranging cDNAs on polymer coated slides is described in Example V; sample cDNA preparation, hybridization, and analysis using polymer coated slides is described in examples VI and VII, respectively.

[0162] The cDNAs are applied to a membrane substrate by one of the following methods. A mixture of cDNAs is fractionated by gel electrophoresis and transferred to a nylon membrane by capillary transfer. Alternatively, the cDNAs are individually ligated to a vector and inserted into bacterial host cells to form a library. The cDNAs are then arranged on a substrate by one of the following methods. In the first method, bacterial cells containing individual clones are robotically picked and arranged on a nylon membrane. The membrane is placed on LB agar containing selective agent (carbenicillin, kanamycin, ampicillin, or chloramphenicol depending on the vector used) and incubated at 37° C. for 16 hours. The membrane is removed from the agar and consecutively placed colony side up in 10% SDS, denaturing solution (1.5 M NaCl, 0.5 M NaOH ), neutralizing solution (1.5 M NaCl, 1 M Tris, pH 8.0), and twice in 2× SSC for 10 minutes each. The membrane is then UV irradiated in a STRATALINKER UV-crosslinker (Stratagene). In the second method, cDNAs are amplified from bacterial vectors by thirty cycles of PCR using primers complementary to vector sequences flanking the insert. PCR amplification increases a starting concentration of 1-2 ng nucleic acid to a final quantity greater than 5 μg. Amplified nucleic acids from about 400 bp to about 5000 bp in length are purified using SEPRACRYL-400 beads (APB). Purified nucleic acids are arranged on a nylon membrane manually or using a dot/slot blotting manifold and suction device and are immobilized by denaturation, neutralization, and WV irradiation as described above.

[0163] Hybridization probes derived from cDNAs of the Sequence Listing are employed for screening cDNAs, mRNAs, or genomic DNA in membrane-based hybridizations. Probes are prepared by diluting the cDNAs to a concentration of 40-50 ng in 45 μl Tris-EDTA (ethylenediamine tetraacetic acid) (TE) buffer, denaturing by heating to 100° C. for five minutes and centrifuging briefly. The denatured cDNA is then added to a REDIPRIME tube (APB), gently mixed until blue color is evenly distributed, and centrifuged briefly. Five microliters of [³²P]dCTP is added to the tube, and the contents are incubated at 37° C. for 10 minutes. The labeling reaction is stopped by adding 5 ,μl of 0.2M EDTA, and probe is purified from unincorporated nucleotides using a PROBEQUANT G-50 microcolumn (APB). The purified probe is heated to 100° C. for five minutes and then snap cooled for 2 minutes on ice.

[0164] Membranes are pre-hybridized in hybridization solution containing 1% Sarkosyl and 1× high phosphate buffer (0.5 M NaCl, 0.1 M Na₂HPO₄, 5 mM EDTA, pH 7) at 55° C. for 2 hours. The diluted in 15 ml fresh hybridization solution, is then added to the membrane. The membrane is hybridized with the probe at 55° C. for 16 hours. Following hybridization, the membrane is washed for 15 minutes at 25° C. in 1 mM Tris (pH 8.0), 1% Sarkosyl, and four times for 15 minutes each at 25° C. in 1 mM Tris (pH 8.0). To detect hybridization complexes, XOMAT-AR film (Eastman Kodak, Rochester N.Y.) is exposed to the membrane overnight at −70° C., developed, and examined.

### XI Expression of the Encoded Protein

[0165] Expression and purification of a protein encoded by a cDNA of the invention is achieved using bacterial or virus-based expression systems. For expression in bacteria, cDNA is subcloned into a vector containing an antibiotic resistance gene and an inducible promoter that directs high levels of cDNA transcription. Examples of such promoters include, but are not limited to, the trp-lac (tac) hybrid promoter and the T5 or T7 bacteriophage promoter in conjunction with the lac operator regulatory element. Recombinant vectors are transformed into bacterial hosts, such as BL21(DE3). Antibiotic resistant bacteria express the protein upon induction with IPTG. Expression in eukaryotic cells is achieved by infecting Spodoptera frugiperda (Sf9) insect cells with recombinant baculovirus, Autographica californica nuclear polyhedrosis virus. The polyhedrin gene of baculovirus is replaced with the cDNA by either homologous recombination or bacterial-mediated transposition involving transfer plasmid intermediates. Viral infectivity is maintained and the strong polyhedrin promoter drives high levels of transcription.

[0166] For ease of purification, the protein is synthesized as a fusion protein with glutathione-S-transferase (GST; APB). The fusion protein is purified on immobilized glutathione under conditions that maintain protein activity and antigenicity. After purification, the GST moiety is proteolytically cleaved from the protein with thrombin. Alternatively, a fusion protein antigenically tagged with FLAG, an 8-amino acid peptide, is purified using commercially available monoclonal and polyclonal anti-FLAG antibodies (Eastman Kodak, Rochester N.Y.).

### XII Production of Specific Antibodies

[0167] A denatured protein from a reverse phase HPLC separation is obtained in quantities up to 75 mg. This denatured protein is used to immunize mice or rabbits following standard protocols. About 100 ,μg is used to immunize a mouse, while up to 1 mg is used to immunize a rabbit. The denatured protein is radioiodinated and incubated with murine B-cell hybridomas to screen for monoclonal antibodies. About 20 mg of protein is sufficient for labeling and screening several thousand clones.

[0168] In another approach, the amino acid sequence translated from a cDNA of the invention is analyzed using PROTEAN software (DNASTAR) to select regions of high antigenicity, antigenically-effective epitopes of the protein. The optimal sequences for immunization are usually at the C-terminus, the N-terminus, and those intervening hydrophilic regions of the protein that are likely to be exposed to the external environment when the protein is in its natural conformation. Typically, oligopeptides about 15 residues in length are synthesized using a 431 peptide synthesizer (ABI) using Fmoc-chemistry and then coupled to keyhole limpet hemocyanin (KLH; Sigma-Aldrich) by reaction with M-maleimidobenzoyl-N-hydroxysuccinimide ester. If necessary, a cysteine may be introduced at the N-termninus of the peptide to permit coupling to KLH. Rabbits are immunized with the oligopeptide-KLH complex in complete Freund's adjuvant. The resulting antisera are tested for antipeptide activity by binding the peptide to plastic, blocking with 1% BSA, reacting with rabbit antisera, washing, and reacting with radioiodinated goat anti-rabbit IgG.

[0169] Hybridomas are prepared and screened using standard techniques. Hybridomas of interest are detected by screening with radioiodinated protein to identify those fusions producing a monoclonal antibody specific for the protein. In a typical protocol, wells of 96 well plates (FAST, Becton-Dickinson, Palo Alto Calif.) are coated with affinity-purified, specific rabbit-anti-mouse (or suitable anti-species Ig) antibodies at 10 mg/ml. The coated wells are blocked with 1% BSA, washed, and exposed to supernatants from hybridomas. After incubation, the wells are exposed to radiolabeled protein at 1 mg/ml. Clones producing antibodies bind a quantity of labeled protein that is detectable above background.

[0170] Such clones are expanded and subjected to 2 cycles of cloning at 1 cell/3 wells. Cloned hybridomas are injected into pristane-treated mice to produce ascites, and monoclonal antibody is purified from the ascitic fluid by affinity chromatography on protein A (APB). Monoclonal antibodies with affinities of at least 10⁸ M⁻¹, preferably 10⁹ to 10¹⁰ M⁻¹ or stronger, are made by procedures well known in the art.

### XIII Purification of Naturally Occurring Protein Using Specific Antibodies

[0171] Naturally occurring or recombinant protein is immunopurified by affinity chromatography using antibodies specific for the protein. An immunoaffinity column is constructed by covalently coupling the antibody to CNBr-activated SEPHAROSE resin (APB). Media containing the protein is passed over the immunoaffinity column, and the column is washed using high ionic strength buffers in the presence of detergent to allow preferential absorbance of the protein. After coupling, the protein is eluted from the column using a buffer of pH 2-3 or a high concentration of urea or thiocyanate ion to disrupt antibody/protein binding, and the protein is collected.

### XIV Screening Molecules for Specific Binding with the cDNA or Protein

[0172] The cDNA or fragments thereof and the protein or portions thereof are labeled with ³²P-dCTP, Cy3-dCTP, Cy5-dCTP (APB), or BIODIPY or FITC (Molecular Probes), respectively. Candidate molecules or compounds previously arranged on a substrate are incubated in the presence of labeled nucleic or amino acid. After incubation under conditions for either a cDNA or a protein, the substrate is washed, and any position on the substrate retaining label, which indicates specific binding or complex formation, is assayed. The binding molecule is identified by its arrayed position on the substrate. Data obtained using different concentrations of the nucleic acid or protein are used to calculate affinity between the labeled nucleic acid or protein and the bound molecule. High throughput screening using very small assay volumes and very small amounts of test compound is fully described in U.S. Pat. No. 5,876,946.

[0173] All patents and publications mentioned in the specification are incorporated herein by reference. Various modifications and variations of the described method and system of the invention will be apparent to those skilled in the art without departing from the scope and spirit of the invention. Although the invention has been described in connection with specific preferred embodiments, it should be understood that the invention as claimed should not be unduly limited to such specific embodiments. Indeed, various modifications of the described modes for carrying out the invention that are obvious to those skilled in the field of molecular biology or related fields are intended to be within the scope of the following claims.

TABLE 1

| SEQ ID | | | Avg | Avg | Avg | Avg | Avg | Avg | Avg | |
|---|---|---|---|---|---|---|---|---|---|---|
| NO | Template ID | Clone ID | Dn5797 | Dn5800 | Dn5793 | Dn5796 | Dn5792 | Dn5799 | Dn5795 | TTEST |
| 1 | 1867417CB1 | 1357231 | −2.81 | −2.71 | −2.25 | −3.08 | −3.66 | −1.90 | | |
| 2 | 1970111CB1 | 1970111 | −1.79 | −2.10 | −1.80 | −2.00 | −3.97 | −1.86 | | |
| 3 | 959142CB1 | 1930447 | −2.74 | −1.72 | −1.98 | −2.73 | −1.81 | −3.14 | −1.61 | 0.855 |
| 4 | 064684.7 | 1824717 | −3.64 | −1.59 | −2.95 | −3.67 | −3.14 | −3.63 | | |
| 5 | 245093.34 | 958486 | −3.91 | −3.82 | −3.69 | −3.34 | −1.78 | −3.18 | | |
| 6 | 331908.5 | 1995457 | −3.44 | −2.23 | −1.67 | −1.91 | −0.20 | −2.22 | −1.65 | 0.9425 |
| 7 | 1329880.35 | 5150602 | −4.05 | −1.87 | −4.15 | −4.43 | −2.05 | −4.14 | −2.00 | 0.8648 |
| 8 | 963555.1 | 2820294 | −4.14 | −2.15 | −4.96 | −4.86 | −1.74 | −4.51 | | |
| 9 | 199471.2 | 2047549 | −2.60 | −2.48 | −1.51 | −3.80 | −4.01 | −1.69 | | |
| 10 | 048849.1 | 1358605 | −3.21 | −1.56 | −2.34 | −3.34 | −1.35 | −3.20 | −1.51 | 0.9964 |
| 11 | 278283.1 | 4180161 | −4.06 | −1.94 | −4.23 | −4.63 | −1.87 | −4.29 | −2.15 | 0.929 |
| 12 | 978433CB1 | 1869068 | −4.49 | −1.65 | −3.35 | −3.48 | −3.38 | −4.46 | −2.44 | 0.8909 |
| 13 | 611514CB1 | 605219 | 2.62 | 2.10 | 2.12 | 2.52 | 2.92 | 2.52 | | |
| 14 | 1382907.35 | 1888708 | 1.79 | 1.98 | 2.12 | 0.42 | 2.39 | 2.15 | 1.65 | 0.7242 |
| 15 | 350509.2 | 1510413 | 1.91 | 2.25 | 1.85 | 3.18 | 3.00 | 2.00 | 1.23 | 0.2156 |
| 16 | 2512879CB1 | 2512879 | 3.06 | 2.19 | 1.61 | 2.41 | 2.71 | 2.94 | | |
| 17 | 241123.1 | 3876732 | 1.42 | 1.83 | 2.15 | 1.76 | 2.71 | 1.59 | 1.85 | 0.3632 |
| 18 | 247817.4 | 1480063 | 1.85 | 1.29 | 2.36 | 2.43 | 2.29 | 1.51 | 1.61 | 0.0862 |
| 19 | 1674368CB1 | 1241484 | 2.17 | 1.43 | 0.96 | 2.75 | 2.22 | 2.09 | 2.07 | 0.6117 |
| 20 | 343963.1 | 2671006 | 2.68 | 1.86 | 1.63 | 2.08 | 2.49 | 1.20 | 1.96 | 0.3444 |
| 21 | 273154CB1 | 2899786 | 2.63 | 4.16 | 1.65 | 4.44 | 3.51 | 2.09 | 0.85 | 0.1263 |
| 22 | 331508.4 | 1967759 | 1.98 | 0.58 | 1.80 | 1.94 | 1.80 | 1.61 | 2.25 | 0.5177 |
| 23 | 1137924.1 | 1480479 | 2.41 | 1.56 | 2.00 | 2.21 | 1.41 | 0.90 | 1.68 | 0.3208 |
| 24 | 247168.4 | 2278925 | 2.26 | 1.43 | 1.89 | 1.81 | 2.56 | 2.15 | 1.00 | 0.5995 |
| 25 | 2275817CB1 | 224996 | 1.96 | 0.83 | 1.58 | 1.68 | 1.75 | 1.63 | 1.40 | 0.8492 |
| 26 | 2717806CB1 | 4918603 | 2.52 | 1.63 | 2.02 | 1.65 | 1.80 | 2.17 | | |
| 27 | 407624.1 | 3771805 | 1.83 | 1.43 | 1.68 | 1.43 | 1.41 | 2.00 | | |
| 28 | 3950154CB1 | 2748163 | 2.12 | 1.10 | 1.38 | 2.51 | 2.61 | 1.96 | 2.35 | 0.5842 |
| 29 | 3741842CB1 | 1988080 | 1.65 | 0.43 | 2.23 | 2.51 | 2.03 | 1.46 | 2.14 | 0.9552 |
| 30 | 221055.4 | 2718391 | 2.69 | 1.20 | 2.25 | 1.68 | 2.10 | 2.40 | 1.56 | 0.9943 |
| 31 | 379425CB1 | 433622 | 1.70 | 1.43 | 1.96 | 2.23 | 3.19 | 1.58 | 0.26 | 0.2891 |
| 32 | 1685090CB1 | 2721792 | 3.48 | 2.66 | 3.75 | 1.74 | 3.72 | 3.22 | 3.42 | 0.5619 |
| 33 | 350476.1 | 123312 | 3.47 | −0.07 | 3.55 | 3.02 | 2.68 | 2.84 | 3.30 | 0.4814 |
| 33 | 350476.1 | 4044520 | 3.39 | −0.26 | 4.50 | 3.89 | 3.69 | 2.76 | | |
| 34 | 404278.1 | 3116479 | 2.22 | 2.09 | 1.63 | 2.19 | 2.84 | 1.77 | | |
| 35 | 1250492CB1 | 1361644 | 2.34 | 2.78 | 2.10 | 2.79 | 3.64 | 2.26 | | |
| 36 | 200095.2 | 3125685 | 2.02 | 2.12 | 1.35 | 2.08 | 2.49 | 1.80 | −0.63 | 0.4459 |
| 37 | 997405.3 | 1240444 | 4.92 | 3.90 | 3.14 | 4.13 | 4.42 | 4.65 | 4.25 | 0.3769 |
| 38 | 235369.10 | 1965041 | 2.55 | 2.07 | 2.29 | 2.98 | 2.70 | 1.91 | 0.43 | 0.3093 |
| 39 | 236587.4 | 1362125 | 3.07 | 2.22 | 2.26 | 3.57 | 2.87 | 2.60 | 0.00 | 0.4502 |
| 40 | 1135936.1 | 4271973 | 2.67 | 2.28 | 3.37 | 3.54 | 3.96 | 3.13 | 4.26 | 0.5115 |
| 41 | 251123.6 | 3557441 | 1.65 | 1.70 | 1.77 | 1.57 | 1.53 | 1.77 | 1.58 | 0.8036 |
| 41 | 251123.6 | 2600963 | 1.56 | 2.34 | 2.06 | 1.87 | 1.12 | 2.04 | | |
| 42 | 2547002CB1 | 2475740 | 2.49 | 1.14 | 2.61 | 1.43 | 1.75 | 1.54 | 2.99 | 0.6935 |
| 43 | 251123.8 | 3557441 | 1.65 | 1.70 | 1.77 | 1.57 | 1.53 | 1.77 | 1.58 | 0.8036 |
| 44 | 1000172.35 | 3645309 | 3.61 | 2.42 | 2.52 | 3.58 | 3.16 | 3.38 | 2.72 | 0.9862 |
| 45 | 2921920CB1 | 1498363 | 3.29 | 0.48 | 2.77 | 2.09 | 2.60 | 1.88 | 3.99 | 0.6319 |
| 46 | 631645CB1 | 1274935 | 2.36 | 1.68 | 1.17 | 2.48 | 1.64 | 2.06 | 1.48 | 0.8188 |
| 46 | 631645CB1 | 1577756 | 1.56 | 1.13 | 0.72 | 1.89 | 1.38 | 1.51 | | |
| 47 | 1507546CB1 | 3507734 | 2.50 | 2.50 | 1.80 | 2.22 | 3.10 | 2.75 | | |
| 48 | 1508437CB1 | 1376121 | 2.53 | 2.60 | 1.88 | 3.00 | 2.96 | 1.74 | 1.17 | 0.0764 |
| 48 | 1508437CB1 | 1607091 | 2.97 | 2.92 | 2.63 | 2.96 | 3.44 | 2.25 | | |
| 49 | 1100669.4 | 1675122 | 2.20 | 1.29 | 1.67 | 2.90 | 2.33 | 1.74 | 2.05 | 0.5901 |
| 50 | 124600CB1 | 1578941 | 3.12 | 0.38 | 3.23 | 2.03 | 3.22 | 2.38 | 2.94 | 0.6875 |
| 51 | 470771.11 | 322066 | 1.51 | 1.52 | 1.74 | 1.68 | 1.94 | 1.84 | 1.51 | 0.9888 |
| 52 | 273259.4 | 2201411 | 2.26 | 1.41 | 1.91 | 1.98 | 1.38 | 0.60 | 1.58 | 0.3717 |
| 53 | 5170638CB1 | 4014022 | 2.52 | 1.51 | 2.64 | 2.62 | 2.15 | 2.06 | 2.71 | 0.8267 |
| 54 | 1330170.3 | 4221057 | 2.15 | 2.50 | 2.46 | 3.22 | 3.81 | 2.32 | | |
| 55 | 1383898.2 | 1499549 | 2.22 | 1.17 | 1.65 | 1.65 | 1.94 | 1.71 | 1.58 | 0.6827 |
| 56 | 019238.3 | 1430507 | 2.79 | 1.53 | 2.00 | 2.46 | 2.56 | 2.18 | 1.29 | 0.4234 |
| 57 | 1102296.5 | 3026658 | 2.20 | 2.88 | 3.58 | 3.84 | 4.97 | 2.39 | | |
| 58 | 995673.3 | 2149968 | 2.15 | 3.10 | 3.21 | 3.48 | 4.56 | 2.16 | | |
| 58 | 995673.3 | 4215545 | 2.26 | 2.53 | 2.91 | 3.34 | 4.26 | 2.17 | | |
| 59 | 312256CB1 | 313697 | 1.71 | 2.02 | 1.91 | 1.81 | 2.23 | 1.94 | 1.72 | 0.5193 |
| 60 | 199183.2 | 2763310 | 2.34 | 2.74 | 2.67 | 2.63 | 2.99 | 2.13 | −1.29 | 0.4125 |
| 61 | 289671.40 | 3678546 | 3.19 | 2.29 | 3.02 | 3.89 | 3.10 | 2.42 | | |
| 62 | 154403.1 | 2050104 | 2.12 | 2.68 | 2.17 | 2.93 | 4.02 | 1.98 | 2.92 | 0.6197 |
| 63 | 086518.22 | 1987759 | 2.47 | 1.51 | 2.20 | 2.42 | 2.51 | 1.94 | | |
| 64 | 1383156.10 | 311197 | 4.70 | 5.83 | 3.18 | 6.64 | 5.29 | 5.17 | 5.83 | 0.6026 |
| 65 | 1100669.3 | 1675122 | 2.20 | 1.29 | 1.67 | 2.90 | 2.33 | 1.74 | 2.05 | 0.5901 |
| 66 | 1330148.1 | 3867795 | 1.89 | 2.73 | 2.26 | 2.23 | 3.38 | 1.54 | 2.59 | 0.5565 |
| 67 | 1436702CB1 | 1358185 | 1.98 | 1.87 | 1.91 | 2.06 | 2.05 | 1.48 | 2.10 | 0.6587 |
| 68 | 3141226CB1 | 3625857 | 2.42 | −0.19 | 2.17 | 4.13 | 4.30 | 1.91 | 1.89 | 0.4588 |
| 69 | 289671.44 | 970905 | 2.34 | 2.02 | 2.34 | 3.60 | 2.58 | 1.83 | 2.02 | 0.0755 |
| 70 | 197927.7 | 2417149 | 2.68 | 1.72 | 2.38 | 2.66 | 3.10 | 2.28 | | |
| 71 | 1134834.2 | 1911306 | 2.08 | 1.46 | 1.96 | 2.08 | 1.19 | 1.86 | 2.25 | 0.3424 |
| 72 | 200273.1 | 2721144 | 2.77 | 2.57 | 2.79 | 3.29 | 2.42 | 2.15 | | |
| 73 | 477974.1 | 3117677 | 2.10 | 2.34 | 1.77 | 2.41 | 3.02 | 2.39 | | |
| 74 | 235095.7 | 1809377 | 2.10 | 1.77 | 1.91 | 1.32 | 2.22 | 1.96 | 1.56 | 0.7161 |
| 75 | 407593.1 | 205053 | 1.41 | 1.92 | 2.02 | 2.26 | 3.41 | 1.46 | | |
| 76 | 332301.1 | 1417150 | 2.12 | 1.51 | 1.91 | 1.72 | 1.81 | 2.29 | | |
| 77 | 407699.4 | 1919860 | 2.05 | 1.61 | 2.25 | 1.83 | 2.41 | 2.05 | | |
| 78 | 405501.1 | 2593077 | 2.63 | 2.66 | 2.34 | 3.25 | 3.20 | 1.56 | | |
| 79 | 482541.2 | 2685454 | 2.35 | 1.84 | 1.90 | 2.56 | 3.00 | 1.96 | | |
| 80 | 237026.3 | 2963374 | 2.02 | 2.25 | 1.96 | 2.55 | 2.55 | 2.23 | | |
| 81 | 443605.4 | 3556587 | 3.26 | 3.38 | 2.49 | 2.92 | 3.32 | 2.87 | 0.32 | 0.4506 |
| 82 | 443605.15 | 3556587 | 3.26 | 3.38 | 2.49 | 2.92 | 3.32 | 2.87 | 0.32 | 0.4506 |
| 83 | 029997.1 | 3638532 | 1.87 | 2.26 | 1.65 | 2.09 | 3.10 | 3.21 | 1.77 | 0.7534 |
| 84 | 331743.9 | 789903 | −1.70 | −1.39 | −1.20 | −1.85 | −2.25 | −1.59 | | |
| 85 | 337334.1 | 3220029 | −1.23 | −1.48 | −0.48 | −1.56 | −1.37 | −0.81 | 0.20 | 0.292 |
| 86 | 410438.2 | 1879818 | 1.96 | 1.72 | 1.26 | 0.60 | 1.83 | 0.13 | 1.54 | 0.5245 |
| 87 | 453004.32 | 2394888 | 1.58 | 1.46 | 1.07 | 1.96 | 1.85 | 1.35 | 0.38 | 0.3609 |
| 88 | 236319.2 | 3044230 | 1.23 | 0.38 | 1.06 | 1.08 | 1.56 | 0.81 | | |
| 89 | 978118.5 | 2508618 | 2.62 | 0.43 | 1.96 | 3.07 | 1.62 | 1.92 | | |
| 90 | 1383177.16 | 1646505 | 1.53 | 0.00 | 1.35 | 1.48 | 2.15 | 1.26 | 1.51 | 0.834 |
| 91 | 1383298.1 | 1510539 | 1.86 | 1.04 | 0.63 | 0.77 | 2.45 | 1.22 | 2.22 | 0.6032 |
| 92 | 1000222.20 | 1729693 | −1.14 | −1.29 | −0.89 | −1.10 | −1.99 | −0.85 | | |
| 93 | 1096863.27 | 1303863 | 1.59 | 0.26 | 1.17 | 1.77 | 0.68 | 1.10 | | |
| 94 | 245334.1 | 2380412 | −3.74 | −2.63 | −1.30 | −3.15 | 0.00 | −2.79 | 0.07 | 0.6767 |
| 95 | 1656674CB1 | 2222802 | 1.40 | 1.67 | 0.76 | 2.08 | 2.33 | 1.34 | 1.32 | 0.3106 |
| 96 | 522678CB1 | 2199851 | −1.48 | −1.04 | −1.83 | −0.14 | −0.99 | −1.42 | | |
| 97 | 1424985CB1 | 2150615 | 1.26 | −0.26 | 1.32 | 0.68 | 1.66 | 1.29 | | |
| 98 | 1468237CB1 | 1573505 | −1.29 | −1.40 | −0.63 | −1.63 | −1.63 | −0.72 | −0.43 | 0.0325 |
| 99 | 337008.1 | 1599272 | 1.85 | 1.23 | 1.32 | −0.88 | 1.58 | 1.65 | 1.70 | 0.2501 |
| 100 | 444850.9 | 2860704 | 1.68 | 1.10 | 1.14 | 1.14 | 0.72 | −0.63 | | |
| 101 | 786284CB1 | 1458210 | 1.87 | 0.85 | 1.96 | 2.37 | 2.06 | 1.07 | 0.58 | 0.0586 |
| 102 | 1352170CB1 | 1988092 | 1.79 | 1.17 | 1.61 | 0.63 | 2.68 | 0.96 | | |
| 103 | 1815320CB1 | 1742116 | 1.14 | −0.38 | 1.61 | 2.54 | 1.56 | 1.10 | 0.32 | 0.3969 |
| 104 | 331192.11 | 2007554 | −0.31 | −1.63 | −2.10 | −3.08 | −3.60 | −1.28 | | |
| 105 | 344053.5 | 2928545 | −2.07 | 1.10 | −1.93 | −1.38 | 0.07 | −2.47 | −1.46 | 0.2316 |
| 106 | 411188.2 | 4247796 | −2.73 | 2.05 | −4.03 | −1.49 | 0.20 | −3.56 | | |
| 107 | 331510.4 | 3814138 | −2.07 | 1.72 | −3.15 | −1.17 | 0.72 | −2.36 | | |
| 108 | 492750CB1 | 2732630 | −1.07 | −1.29 | −0.85 | −1.65 | −1.74 | −0.67 | | |
| 109 | 348912.4 | 1716655 | 2.70 | 2.31 | 1.80 | 1.65 | 2.87 | 0.43 | −1.92 | 0.2253 |
| 110 | 2680109CB1 | 2242677 | 1.59 | 1.61 | 1.23 | 1.72 | 1.98 | 1.54 | −0.81 | 0.4763 |
| 110 | 2680109CB1 | 2125020 | 1.20 | 1.03 | 0.72 | 0.93 | 1.60 | 1.29 | | |
| 111 | 512261CB1 | 512261 | 1.29 | 0.67 | 1.37 | 1.93 | 1.53 | 0.93 | 1.43 | 0.6267 |
| 112 | 232719.2 | 1848259 | 1.14 | 0.32 | 1.59 | 1.10 | 1.49 | 0.80 | 1.26 | 0.7793 |
| 113 | 369664.2 | 3119171 | −2.20 | 2.45 | −2.74 | −1.35 | 0.43 | −2.62 | −1.63 | 0.2357 |
| 114 | 021042.1 | 2879922 | −3.02 | −1.32 | −2.62 | −3.18 | 0.07 | −2.82 | −1.04 | 0.945 |
| 115 | 418805.7 | 1637320 | 1.16 | 1.07 | 1.43 | 1.14 | 2.23 | 0.53 | | |
| 116 | 1094000.4 | 1397816 | 1.94 | −0.12 | 1.98 | 0.00 | 1.80 | 2.17 | | |
| 117 | 1094000.5 | 1380927 | 2.94 | 0.48 | 3.50 | 2.51 | 2.97 | 2.86 | | |
| 118 | 1222734CB1 | 1300701 | 2.02 | 0.13 | 2.08 | 0.00 | 1.90 | 2.17 | | |
| 118 | 1222734CB1 | 1397816 | 1.94 | −0.12 | 1.98 | 0.00 | 1.80 | 2.17 | | |
| 119 | 411205.5 | 1420883 | −2.06 | −2.10 | −0.76 | −3.13 | −2.98 | −1.68 | | |
| 120 | 1092777.6 | 1643711 | 1.29 | 0.43 | 1.46 | 1.82 | 1.28 | 0.99 | 1.51 | 0.9874 |
| 121 | 234358.5 | 1996180 | −1.35 | −1.34 | −0.72 | −2.48 | −2.71 | −1.31 | 0.26 | 0.3401 |
| 122 | 1092777.7 | 1643711 | 1.29 | 0.43 | 1.46 | 1.82 | 1.28 | 0.99 | 1.51 | 0.9874 |
| 123 | 4180444CB1 | 3872317 | 1.23 | 1.23 | 0.53 | 1.29 | 1.25 | 1.17 | 1.54 | 0.3847 |
| 124 | 1987983CB1 | 690819 | 1.76 | 1.34 | 1.00 | 1.45 | 1.53 | 1.07 | 1.61 | 0.8297 |
| 125 | 1398420.2 | 4655050 | 2.19 | 1.82 | 1.85 | 1.32 | 2.18 | 0.53 | −1.04 | 0.2136 |
| 126 | 1749102CB1 | 1749102 | 3.32 | 2.23 | 2.09 | 2.44 | −1.54 | 0.48 | 1.17 | 0.3762 |
| 127 | 2965804CB1 | 2965804 | 1.28 | 0.20 | 2.26 | 1.64 | 3.31 | 1.54 | | |
| 128 | 210095.21 | 1285926 | 2.29 | 1.26 | 1.87 | 1.07 | 2.51 | 0.53 | | |
| 129 | 1555752CB1 | 42248 | −1.14 | −1.10 | 0.00 | −1.98 | −2.54 | −0.29 | | |
| 130 | 110245.1 | 3028719 | −1.04 | −1.23 | 0.07 | −1.84 | −1.60 | −0.43 | 0.34 | 0.1341 |
| 131 | 009476CB1 | 2017386 | −1.51 | −0.96 | −0.72 | −1.96 | −1.85 | −1.43 | | |
| 132 | 1560874CB1 | 3815942 | −1.46 | −1.20 | −0.67 | −1.74 | −1.53 | −0.38 | −0.13 | 0.0061 |
| 133 | 3571894CB1 | 2132715 | −1.04 | −0.58 | −0.68 | −1.28 | 1.74 | −1.72 | | |
| 134 | 349622.1 | 2055903 | −3.15 | −1.11 | −2.05 | −5.27 | −0.24 | −0.85 | | |
| 135 | 002940CB1 | 1679482 | −1.77 | −1.30 | −0.58 | −2.21 | −2.01 | −0.29 | 0.13 | 0.0114 |
| 136 | 1362466CB1 | 1834502 | −1.03 | −1.38 | −0.92 | −2.12 | −2.20 | −1.23 | 0.58 | 0.3975 |
| 137 | 383376.19 | 4461157 | 1.74 | 1.00 | 1.17 | 1.89 | 2.05 | 0.76 | 1.65 | 0.558 |
| 138 | 1382961.3 | 3184882 | −4.32 | −1.91 | −1.58 | −3.76 | 0.58 | −0.20 | 0.37 | 0.0581 |
| 139 | 1382961.15 | 4382348 | −5.07 | −4.05 | −3.81 | −5.39 | 1.14 | −0.13 | | |
| 140 | 1454852CB1 | 793403 | −3.01 | −2.51 | −1.32 | −2.42 | −0.14 | −0.26 | 0.38 | 0.0253 |
| 141 | 2161632CB1 | 954057 | −1.78 | −1.72 | −0.58 | −1.59 | −0.68 | −1.32 | 0.19 | 0.5145 |
| 142 | 2058013CB1 | 1968413 | −3.63 | −1.24 | −2.30 | −3.70 | 0.72 | −0.20 | | |
| 143 | 235333.1 | 1684632 | 2.16 | 0.81 | 2.32 | 2.03 | 2.58 | 1.35 | | |
| 144 | 702628CB1 | 2418629 | −1.35 | −1.70 | −1.46 | −2.31 | −2.05 | −1.10 | | |
| 145 | 1383415.3 | 1420380 | −1.98 | −1.14 | −0.68 | −2.87 | −2.37 | 0.00 | 0.19 | 0.0077 |
| 146 | 236309.1 | 2925376 | 1.58 | 1.26 | 0.63 | 0.71 | 1.30 | 1.29 | | |
| 147 | 344868.13 | 3333118 | −0.48 | −1.04 | −1.00 | −1.07 | −1.51 | −1.23 | | |
| 148 | 368869.1 | 5100602 | −1.93 | 2.26 | −2.83 | −1.49 | 0.13 | −2.38 | | |
| 149 | 3256566CB1 | 1666069 | −2.39 | −1.72 | −0.43 | −1.80 | 0.26 | −1.48 | | |
| 150 | 4104673CB1 | 4104673 | −3.20 | −1.56 | −0.72 | −4.70 | 1.93 | −2.75 | | |
| 151 | 345511.2 | 4243318 | 2.12 | 2.02 | 1.65 | 2.22 | 2.07 | 1.20 | | |
| 152 | 1723834CB1 | 1723834 | −2.56 | −1.59 | −1.35 | −1.44 | −3.11 | −0.77 | −0.48 | 0.0151 |
| 153 | 078756CB1 | 490795 | 3.16 | 0.00 | 2.94 | 1.22 | 2.33 | 2.08 | 2.75 | 0.5062 |
| 154 | 331749.3 | 1628341 | −4.41 | −3.57 | −0.85 | −4.02 | 0.24 | −1.48 | 0.26 | 0.2185 |
| 155 | 350528.7 | 1429293 | 1.56 | 0.53 | 0.96 | 1.44 | 1.51 | 1.35 | 1.91 | 0.3306 |
| 156 | 1099159.1 | 1519404 | −2.47 | −1.35 | −1.92 | −3.39 | −0.26 | −2.32 | −0.05 | 0.6525 |
| 157 | 1530186CB1 | 3715059 | 1.31 | 1.22 | 1.89 | 3.14 | 1.94 | 1.51 | 1.46 | 0.2931 |
| 158 | 1092387.11 | 2674527 | −3.22 | −1.49 | −0.26 | −4.28 | 0.96 | −2.93 | | |
| 159 | 107939.2 | 2313581 | 1.29 | 0.37 | 1.34 | 1.03 | 1.13 | 0.72 | 1.68 | 0.788 |
| 160 | 899248.6 | 1832584 | 1.61 | 1.03 | 2.12 | 1.10 | 1.61 | 0.14 | | |
| 161 | 2959521CB1 | 87727 | −1.38 | −1.69 | −0.43 | −1.29 | −0.26 | −1.35 | | |
| 162 | 3331519CB1 | 2197965 | 1.91 | 0.77 | 1.73 | 2.33 | 1.26 | 1.00 | 1.56 | 0.4695 |
| 163 | 1453334CB1 | 1445547 | −2.10 | −2.42 | −0.96 | −1.65 | 0.00 | −1.89 | −0.53 | 0.815 |
| 164 | 2798854CB1 | 4385292 | −1.26 | −1.60 | −0.43 | −2.55 | −1.11 | 0.00 | | |
| 165 | 227961.1 | 2742979 | −1.10 | −1.17 | −0.58 | −2.47 | −1.98 | −1.00 | −0.14 | 0.2247 |
| 166 | 1427470CB1 | 1430862 | 2.12 | 0.48 | 1.17 | 0.24 | 1.43 | 1.51 | 1.38 | 0.354 |
| 167 | 206250.6 | 2180220 | 2.17 | 1.23 | 0.76 | 1.69 | 2.32 | 1.50 | 1.63 | 0.8272 |
| 168 | 995068.15 | 893230 | 1.43 | 1.17 | 1.60 | 1.87 | 0.00 | 1.10 | 1.74 | 0.6796 |
| 169 | 2545475CB1 | 1981569 | −2.76 | −2.44 | −0.63 | −1.91 | −1.59 | −1.17 | 0.19 | 0.2439 |
| 170 | 1502559CB1 | 1502559 | 1.43 | −0.58 | 1.26 | 1.38 | 1.50 | 0.89 | | |
| 171 | 2239738CB1 | 2239738 | 1.85 | 2.38 | 1.17 | 1.17 | 1.45 | 1.10 | 0.43 | 0.1717 |
| 172 | 347572.1 | 1501621 | 1.26 | 1.35 | 1.26 | 0.54 | 1.48 | −1.06 | 0.14 | 0.2033 |
| 173 | 977985.10 | 1445387 | 1.17 | 1.14 | 2.00 | 2.31 | 1.41 | 0.93 | | |
| 174 | 236582.2 | 2720359 | 2.17 | 1.97 | 1.48 | 1.91 | 1.91 | 0.96 | 0.76 | 0.0033 |
| 175 | 403676.1 | 1656490 | 1.14 | 2.25 | −0.26 | 1.07 | 1.54 | 0.63 | | |
| 176 | 138472CB1 | 2373085 | 2.98 | 2.17 | 1.23 | 2.70 | 2.54 | 2.57 | 1.13 | 0.6288 |
| 177 | 253672.11 | 2851539 | −1.14 | −1.56 | −0.63 | −1.43 | −0.93 | −1.29 | −0.20 | 0.5998 |
| 178 | 201928.3 | 2126712 | −1.90 | −1.80 | −1.40 | −2.33 | −2.34 | −1.43 | | |
| 179 | 198643.1 | 2187262 | −1.48 | −1.07 | −0.20 | −1.26 | −1.07 | −0.68 | | |
| 180 | 979448.2 | 1497012 | 1.41 | 0.48 | 1.29 | 1.14 | 1.26 | 1.17 | 1.07 | 0.9824 |
| 181 | 460745.7 | 1381145 | 1.29 | 0.80 | 1.46 | 1.07 | 1.69 | 1.26 | | |
| 182 | 399300.18 | 2842978 | 1.46 | −0.07 | 1.61 | 0.43 | 1.43 | 1.07 | 2.10 | 0.4263 |
| 183 | 248091.1 | 1607083 | 1.20 | 1.03 | 0.68 | 1.20 | 1.84 | 0.92 | | |
| 184 | 4030737CB1 | 2440848 | 1.70 | 0.93 | 1.68 | 1.26 | 1.49 | 1.56 | 1.58 | 0.3354 |
| 185 | 3012575CB1 | 3012575 | 1.72 | 0.81 | 1.48 | 2.63 | 1.49 | 1.46 | 1.10 | 0.3625 |
| 186 | 221827.1 | 2057406 | 0.89 | 0.63 | 2.12 | 1.26 | 2.43 | 1.63 | | |
| 187 | 238660.5 | 1604437 | 0.63 | 2.07 | 0.89 | 1.26 | 3.06 | 1.14 | 2.17 | 0.922 |
| 188 | 2171401CB1 | 2055814 | −1.35 | −1.00 | −1.12 | −1.40 | −2.48 | −1.61 | −0.26 | 0.5691 |
| 189 | 1420940CB1 | 1603408 | 2.12 | 0.43 | 2.19 | 1.94 | 2.27 | 1.87 | | |
| 190 | 1383160.14 | 1834906 | 1.14 | 0.20 | 1.58 | 1.14 | 0.26 | 1.26 | | |
| 191 | 233331.8 | 2154725 | 1.38 | 1.04 | 1.48 | 0.48 | 1.23 | 0.98 | 1.38 | 0.8431 |
| 192 | 338217.10 | 1989545 | 1.51 | 1.14 | 2.23 | 2.42 | 1.48 | 1.00 | | |
| 193 | 5982278CB1 | 2640427 | −1.48 | −1.83 | 0.00 | −1.58 | −1.51 | −0.66 | 0.07 | 0.1445 |
| 194 | 1097030.1 | 1760232 | 1.63 | 0.13 | 1.51 | 1.87 | 1.20 | 0.87 | | |
| 195 | 1100509.4 | 2215183 | 1.96 | 0.85 | 1.80 | 1.53 | 1.63 | 1.10 | 1.38 | 0.2493 |
| 196 | 199671.1 | 1694119 | 1.85 | 1.26 | 2.02 | 1.93 | 1.58 | 1.14 | | |
| 197 | 232137.20 | 2053221 | −0.20 | −1.89 | −0.58 | −1.14 | −1.25 | −1.17 | | |
| 198 | 898608.2 | 3112520 | 1.04 | 0.92 | 1.04 | 1.20 | 1.26 | 1.43 | | |
| 199 | 411373.3 | 1625856 | 1.85 | −0.85 | 1.42 | 1.63 | 2.02 | 1.72 | | |
| 200 | 1092387.17 | 2070554 | −2.14 | −1.32 | −0.32 | −3.11 | 0.67 | −1.83 | | |
| 201 | 201906.5 | 3733666 | 1.78 | 1.68 | 1.23 | −1.20 | 0.07 | 1.26 | | |
| 202 | 3607580CB1 | 3607580 | 0.93 | 0.07 | 1.29 | 2.04 | 2.43 | 2.03 | 2.65 | 0.1241 |
| 203 | 991163CB1 | 1809178 | 1.29 | 1.43 | 1.74 | 0.46 | 2.66 | 1.29 | 0.00 | 0.3788 |
| 204 | 1309633.1 | 1880421 | −1.04 | −1.29 | −0.43 | 0.12 | −1.89 | −1.40 | | |
| 205 | 1384719.29 | 4372330 | −1.81 | −1.72 | −0.26 | −1.68 | −1.45 | −0.96 | 0.32 | 0.3135 |
| 206 | 178250.2 | 3075015 | −1.13 | −1.59 | −0.48 | −1.68 | −1.44 | −0.57 | | |
| 207 | 1099945.13 | 1911742 | −1.54 | −1.23 | −1.35 | −1.41 | −0.14 | −1.68 | | |
| 208 | 2172334CB1 | 2172334 | 2.03 | 0.85 | 1.70 | 1.61 | 1.48 | 1.80 | 0.58 | 0.673 |
| 209 | 253946.17 | 3625189 | 1.46 | 0.76 | 1.07 | 1.61 | 1.68 | 0.85 | | |
| 210 | 008513.49 | 2057510 | −6.64 | −5.91 | −4.12 | −6.61 | 0.00 | −1.38 | 0.07 | 0.0402 |
| 211 | 1092257.2 | 3440567 | 1.35 | 0.85 | 1.40 | 1.44 | 1.63 | 2.01 | 1.04 | 0.762 |
| 211 | 1092257.2 | 1447795 | 1.23 | 0.43 | 1.42 | 1.65 | 0.92 | 2.15 | | |
| 211 | 1092257.2 | 1962235 | 1.10 | 0.76 | 1.84 | 1.14 | 1.99 | 1.65 | | |
| 212 | 4349106CB1 | 2820861 | 1.35 | 0.68 | 1.77 | 1.43 | 2.05 | 2.02 | | |
| 213 | 1814803CB1 | 1698951 | −1.56 | −1.43 | −0.72 | −1.86 | −1.70 | −0.92 | | |
| 214 | 1141764.8 | 1926114 | −0.96 | −1.56 | −1.04 | −1.23 | 0.38 | −1.83 | | |
| 215 | 406531.1 | 1603580 | 1.70 | 0.81 | 1.17 | 1.26 | 1.74 | 1.07 | | |
| 216 | 429307.4 | 3144021 | −3.74 | −1.70 | −1.25 | −3.24 | 0.00 | −0.63 | 0.00 | 0.0761 |
| 217 | 239515.9 | 1675369 | 1.93 | 1.00 | 1.54 | 1.43 | 1.93 | 1.51 | 0.38 | 0.4606 |
| 218 | 1089210.1 | 5033671 | −2.70 | −1.43 | 0.43 | −4.18 | 2.15 | −2.02 | 0.43 | 0.8466 |
| 219 | 010796.18 | 1445895 | 1.82 | 0.85 | 1.43 | 1.14 | 1.35 | 1.35 | | |
| 220 | 3752346CB1 | 1378037 | −1.51 | −1.07 | −0.48 | −1.43 | −1.92 | −0.20 | | |
| 221 | 2729828CB1 | 1858171 | −1.86 | −1.23 | −3.09 | −3.35 | 1.13 | −0.48 | | |
| 222 | 1648579CB1 | 3142624 | 1.35 | 0.07 | 1.74 | 2.32 | 2.58 | 1.10 | | |
| 223 | 1454418CB1 | 1468660 | −1.63 | −2.26 | −0.53 | −2.14 | −3.14 | −0.38 | 0.37 | 0.0305 |
| 224 | 995529.10 | 2957476 | −1.80 | −2.90 | −0.50 | −3.55 | −3.67 | −1.10 | | |
| 225 | 2126751CB1 | 2126751 | −1.17 | −1.56 | −0.63 | −1.48 | −1.10 | −1.29 | −0.14 | 0.5579 |
| 226 | 569648CB1 | 2720467 | 2.10 | 2.02 | 1.20 | 1.71 | 2.26 | 1.98 | 0.93 | 0.5797 |
| 227 | 1352789CB1 | 3000146 | 2.26 | 1.48 | 1.29 | 1.86 | 1.38 | 0.68 | 1.35 | 0.2624 |
| 228 | 1635966CB1 | 2046165 | 1.56 | 1.94 | 1.23 | 1.13 | −0.85 | 0.93 | 1.63 | 0.6637 |
| 229 | 349415.6 | 3074415 | −2.14 | 0.19 | −0.72 | −1.51 | −2.79 | −2.91 | | |
| 230 | 406438.14 | 2797787 | −1.04 | −1.26 | −0.80 | −1.26 | −0.72 | −1.49 | | |
| 231 | 1471808CB1 | 3074415 | −2.14 | 0.19 | −0.72 | −1.51 | −2.79 | −2.91 | | |
| 232 | 245595.1 | 2052480 | −1.43 | −2.10 | 0.00 | −0.69 | −2.42 | −1.68 | | |
| 233 | 2784232CB1 | 3151158 | 1.43 | 1.17 | 1.10 | 1.54 | 1.48 | 0.26 | | |
| 234 | 2742913CB1 | 2516950 | 1.03 | 0.32 | 1.04 | 1.10 | 0.81 | 1.22 | 1.48 | 0.0717 |
| 235 | 1509972CB1 | 4047785 | 1.40 | 1.96 | 1.00 | 1.25 | 1.26 | 1.65 | −0.07 | 0.6192 |
| 236 | 1097638.1 | 1903760 | 0.14 | 0.38 | 1.89 | 1.61 | 2.74 | 1.26 | | |
| 237 | 900035.58 | 5186773 | −1.98 | −1.07 | −1.74 | −2.91 | −0.96 | −1.91 | −0.53 | 0.5926 |
| 237 | 900035.58 | 1900306 | −3.13 | −1.10 | −2.77 | −2.47 | −0.68 | −2.47 | | |
| 238 | 1075592.6 | 1423848 | −1.26 | −0.32 | −1.86 | −1.94 | −1.35 | −1.48 | −0.85 | 0.7018 |
| 239 | 984540.1 | 1393337 | 2.00 | 0.20 | 2.00 | 1.29 | 2.09 | 1.39 | 1.14 | 0.54 |
| 240 | 378633.40 | 1821938 | 1.29 | 1.45 | 1.14 | 1.89 | 2.79 | 1.46 | | |
| 241 | 477387.7 | 3100048 | −1.00 | −0.53 | −1.40 | −1.74 | −1.67 | −1.48 | | |
| 242 | 347049.9 | 2057158 | 2.19 | 1.87 | 1.72 | 1.92 | 2.49 | 1.14 | 0.88 | 0.0088 |
| 243 | 1097717.18 | 5065213 | −1.32 | −2.15 | −0.58 | −1.56 | −1.49 | −0.58 | 0.63 | 0.214 |
| 244 | 2832214CB1 | 2832214 | −1.23 | −2.05 | −0.85 | −1.07 | −1.22 | −0.43 | | |
| 245 | 2947513CB1 | 5984038 | −1.32 | −2.28 | −0.76 | −1.54 | −1.48 | −0.63 | 0.53 | 0.2065 |
| 246 | 1655369CB1 | 2056840 | 1.17 | 1.03 | 1.29 | 1.26 | 1.56 | 1.00 | 0.85 | 0.0456 |
| 247 | 039170.3 | 2418484 | −1.37 | −2.28 | −0.76 | −1.72 | −2.14 | −0.85 | | |
| 248 | 1074926.1 | 2947513 | −1.43 | −2.33 | −0.96 | −1.54 | −1.37 | −0.63 | | |
| 249 | 344297.5 | 62144 | −1.03 | −1.06 | 0.20 | −1.12 | −1.63 | −0.42 | 0.00 | 0.1143 |
| 250 | 410721.1 | 4688 | −2.23 | −0.07 | −2.96 | −1.51 | −3.54 | −2.63 | | |
| 251 | 1121097.1 | 1450641 | −1.43 | 0.79 | −1.74 | −1.10 | 0.53 | −1.45 | | |
| 252 | 1097450.22 | 3374194 | 1.38 | 1.20 | 0.38 | 1.51 | 1.45 | 0.20 | | |
| 253 | 238533.1 | 2790947 | 1.96 | 0.31 | 1.91 | 1.33 | 1.83 | 0.92 | | |
| 254 | 1097080.8 | 2694381 | 0.58 | 0.32 | 1.65 | 1.14 | 1.48 | 1.04 | | |
| 255 | 1097450.20 | 3374194 | 1.38 | 1.20 | 0.38 | 1.51 | 1.45 | 0.20 | | |
| 256 | 2514988CB1 | 1886886 | 1.46 | −0.14 | 2.06 | 1.86 | 2.15 | 1.10 | 2.12 | 0.8568 |
| 257 | 3130485CB1 | 1987238 | 1.77 | 2.74 | 2.55 | 1.26 | 3.19 | 0.53 | | |
| 258 | 1330234.11 | 5392723 | −2.05 | −1.22 | −2.23 | −2.29 | −1.38 | −1.52 | | |
| 259 | 1943624CB1 | 1943624 | 0.37 | 1.45 | 1.28 | 2.72 | 1.93 | 0.63 | −1.26 | 0.2657 |
| 260 | 2189816CB1 | 2189816 | 1.79 | 1.29 | 0.60 | 2.36 | 1.29 | 2.01 | 1.00 | 0.9536 |
| 261 | 039027.1 | 3861522 | −2.17 | −2.35 | −1.41 | −1.63 | −0.46 | −1.20 | | |
| 262 | 2502336CB1 | 2507719 | −1.65 | −0.07 | −2.72 | −0.99 | −2.77 | −1.85 | | |
| 263 | 3592543CB1 | 5066393 | 1.20 | 0.48 | 1.83 | 2.17 | 0.92 | 1.85 | | |
| 264 | 399589.1 | 2070856 | 1.68 | 0.96 | 1.58 | 1.71 | 1.96 | 0.96 | | |
| 265 | 2175401CB1 | 1833174 | 1.48 | 1.10 | 0.92 | 1.38 | 1.38 | 0.26 | | |
| 266 | 084455.9 | 1356268 | 1.17 | 1.17 | 2.17 | 2.32 | 2.28 | 1.23 | | |
| 267 | 233041.5 | 2060622 | −1.40 | −1.20 | −0.14 | −1.77 | 1.15 | −0.81 | | |
| 268 | 1382961.5 | 3184882 | −4.32 | −1.91 | −1.58 | −3.76 | 0.58 | −0.20 | 0.37 | 0.0581 |
| 269 | 1518310CB1 | 1518310 | −3.23 | −2.77 | −1.06 | −2.69 | 0.00 | −1.54 | 0.37 | 0.3569 |
| 270 | 1517817CB1 | 1402078 | 2.14 | 1.04 | 0.38 | 1.79 | 1.54 | 0.00 | 1.05 | 0.3119 |
| 271 | 3090387CB1 | 1714684 | 2.08 | 1.23 | 0.96 | 1.65 | 1.78 | 1.00 | 1.14 | 0.0793 |
| 272 | 3836893CB1 | 3836893 | 2.60 | 0.68 | 1.24 | 3.56 | 2.49 | 2.26 | 1.29 | 0.6605 |
| 273 | 394121.2 | 2796118 | −1.60 | 1.14 | 1.40 | 1.50 | 2.03 | 1.10 | −0.53 | 0.6076 |
| 274 | 2347046CB1 | 2347046 | −1.26 | −1.70 | −0.63 | −1.74 | −2.76 | −1.29 | 0.07 | 0.3472 |
| 275 | 1137894.1 | 2059420 | 1.46 | 0.80 | 2.74 | 4.02 | 3.71 | 1.54 | 0.07 | 0.1819 |
| 276 | 1137536.4 | 1753015 | −1.35 | −1.53 | −0.48 | −1.77 | −1.87 | −1.29 | | |
| 277 | 2501808CB1 | 2501808 | −1.17 | −1.29 | −0.89 | −2.67 | −2.90 | −1.10 | −0.38 | 0.1348 |
| 278 | 4767318CB1 | 3088261 | −1.07 | −1.87 | −0.26 | −1.87 | −1.32 | 0.20 | −0.14 | 0.0128 |
| 279 | 1223705CB1 | 1633118 | −3.41 | −0.07 | −1.17 | −3.60 | 0.13 | −2.76 | −0.53 | 0.9891 |
| 280 | 296696.7 | 851875 | 1.23 | 0.57 | 1.38 | 2.29 | 1.20 | 0.93 | 1.23 | 0.4562 |
| 281 | 410320.1 | 2886536 | 1.81 | 1.81 | 1.07 | 2.25 | 2.12 | 0.58 | | |
| 282 | 426109.1 | 2057823 | −2.03 | −2.53 | −0.37 | −2.64 | −2.57 | −1.17 | 0.07 | 0.1849 |
| 283 | 1098589.27 | 2152363 | −1.87 | −1.83 | −1.14 | −1.79 | −2.66 | −1.07 | | |
| 284 | 233575.1 | 1222942 | −0.48 | −1.35 | −0.72 | −1.45 | −1.53 | −1.49 | | |
| 285 | 235191.4 | 1997915 | −1.35 | −1.94 | −1.23 | −3.06 | −2.97 | −1.43 | −0.43 | 0.1838 |
| 286 | 468221.19 | 1662856 | −1.34 | −1.26 | −1.17 | −1.77 | −0.84 | −0.43 | | |
| 287 | 986342.1 | 2811372 | 0.96 | 0.76 | 1.38 | 1.61 | 1.07 | 1.17 | | |
| 288 | 240120.3 | 2795141 | 1.26 | 0.20 | 2.48 | 2.09 | 2.56 | 1.98 | 1.32 | 0.9076 |
| 289 | 5511889CB1 | 6105902 | 0.07 | 0.26 | 1.92 | 2.42 | 2.05 | 1.04 | | |
| 290 | 3009578CB1 | 3009578 | −1.07 | −1.10 | −0.43 | −1.43 | −1.83 | −0.68 | | |
| 291 | 982520.1 | 4821815 | −3.52 | −0.53 | −1.16 | −2.86 | −0.20 | −2.53 | −2.23 | 0.3352 |
| 292 | 899156.36 | 2851850 | 1.07 | 0.48 | 0.92 | 1.63 | 1.79 | 1.41 | | |
| 293 | 1748428CB1 | 1658215 | 1.70 | 0.07 | 0.99 | 1.53 | 1.92 | 1.07 | 1.51 | 0.9089 |
| 294 | 238540.1 | 1608244 | −1.07 | 1.38 | 1.14 | 0.89 | 1.70 | 1.04 | | |
| 295 | 898495.3 | 5261507 | −0.96 | −1.77 | −0.48 | −1.40 | −1.22 | −1.10 | | |
| 296 | 369213.48 | 1292449 | 1.17 | 1.54 | 0.20 | 2.07 | 1.30 | 0.43 | | |
| 297 | 3084563CB1 | 5834427 | 1.38 | 0.00 | 1.41 | 1.35 | 1.54 | 0.93 | | |
| 298 | 237613.7 | 1975550 | 2.00 | 0.81 | 2.16 | 1.83 | 1.54 | 1.53 | 0.07 | 0.4332 |
| 299 | 2630652CB1 | 2152363 | −1.87 | −1.83 | −1.14 | −1.79 | −2.66 | −1.07 | | |
| 300 | 5785224CB1 | 1212335 | −1.49 | −1.29 | −1.10 | −0.81 | −0.48 | −1.29 | | |
| 301 | 409911.8 | 2219364 | 2.33 | 1.53 | 1.95 | 1.13 | 1.91 | 1.78 | 1.20 | 0.5089 |
| 302 | 2418523CB1 | 2454639 | −0.13 | −1.32 | 0.32 | −1.74 | −2.11 | −0.07 | 1.14 | 0.1642 |
| 303 | 1091297.30 | 2418490 | 1.14 | 1.14 | 1.14 | 1.53 | 1.07 | −0.68 | 0.26 | 0.1952 |
| 304 | 369213.2 | 2200842 | 1.61 | 2.79 | 1.04 | 2.14 | 1.14 | −0.32 | −0.38 | 0.0029 |
| 305 | 221869.5 | 5523515 | 1.38 | 0.38 | 1.41 | 1.74 | 0.46 | 1.92 | | |
| 306 | 995529.6 | 2957476 | −1.80 | −2.90 | −0.50 | −3.55 | −3.67 | −1.10 | | |
| 307 | 982959.1 | 3115823 | −2.36 | −0.76 | −1.23 | −2.17 | −0.48 | −1.87 | −1.00 | 0.9556 |
| 308 | 342074.1 | 4408943 | 2.51 | 0.00 | 0.53 | 1.74 | 2.32 | −1.06 | 1.63 | 0.5484 |
| 309 | 245194.2 | 1512826 | −1.29 | −0.43 | −1.06 | −1.89 | −0.24 | −1.51 | −1.48 | 0.1607 |
| 310 | 246444.6 | 3382391 | −3.48 | −1.94 | −1.24 | −6.57 | 0.13 | −0.32 | | |
| 311 | 374054.4 | 3843227 | 1.23 | 0.99 | 1.20 | 2.18 | 1.74 | 1.07 | 1.61 | 0.7411 |
| 312 | 001322.4 | 2663164 | 1.51 | 0.20 | 1.07 | 1.20 | 1.23 | 0.63 | 1.04 | 0.5361 |
| 313 | 406438.12 | 2797787 | −1.04 | −1.26 | −0.80 | −1.26 | −0.72 | −1.49 | | |
| 314 | 1382961.12 | 4382348 | −5.07 | −4.05 | −3.81 | −5.39 | 1.14 | −0.13 | | |
| 315 | 1359783CB1 | 3138721 | 1.51 | −1.00 | 0.81 | 1.34 | 2.49 | 1.40 | | |
| 316 | 1796035CB1 | 3986547 | 2.31 | 1.77 | 1.29 | 1.85 | 2.18 | 1.72 | | |
| 317 | 444850.11 | 2860704 | 1.68 | 1.10 | 1.14 | 1.14 | 0.72 | −0.63 | | |
| 318 | 236062CB1 | 2238411 | 1.14 | 0.20 | 1.65 | 2.39 | 1.63 | 0.53 | 1.29 | 0.4169 |
| 319 | 333238.12 | 2833637 | −1.10 | −1.26 | −0.14 | −1.48 | −1.14 | −1.17 | | |
| 320 | 475547.2 | 1955363 | 1.83 | 1.40 | 1.63 | 1.63 | 2.92 | 1.23 | | |
| 321 | 977929.1 | 4112181 | 1.26 | 0.72 | 1.14 | 1.86 | 1.51 | 1.26 | | |
| 322 | 1362715CB1 | 1816113 | 1.79 | 1.26 | 2.15 | 2.94 | 2.46 | 1.46 | 0.63 | 0.1629 |
| 323 | 3117642CB1 | 3117642 | −2.23 | 1.56 | −2.72 | −1.54 | −0.14 | −2.45 | | |
| 324 | 2026270CB1 | 2026270 | −4.45 | −1.71 | −1.77 | −3.14 | 0.00 | −0.34 | 0.00 | 0.0512 |
| 325 | 981662.2 | 4401727 | −1.10 | −1.22 | −0.72 | −1.98 | −1.60 | −0.53 | | |
| 326 | 453004.10 | 2394888 | 1.58 | 1.46 | 1.07 | 1.96 | 1.85 | 1.35 | 0.38 | 0.3609 |
| 327 | 978147.7 | 2784394 | −1.10 | −1.17 | −0.68 | −1.98 | −3.04 | −0.43 | | |
| 328 | 2132626CB1 | 541875 | 1.80 | 0.85 | 2.23 | 2.33 | 1.96 | 1.29 | 2.55 | 0.9157 |
| 329 | 402716.37 | 4199466 | 1.74 | 1.23 | 1.16 | 3.08 | 1.85 | 1.93 | 1.41 | 0.7577 |
| 330 | 464482.1 | 625374 | 1.82 | 2.05 | 1.46 | 0.53 | 0.14 | 1.56 | 1.94 | 0.2439 |
| 331 | 402716.20 | 4199466 | 1.74 | 1.23 | 1.16 | 3.08 | 1.85 | 1.93 | 1.41 | 0.7577 |
| 332 | 1137710.5 | 1713191 | 1.23 | 1.00 | 1.14 | 1.64 | −0.07 | 1.09 | 1.20 | 0.6157 |
| 333 | 348912.3 | 1716655 | 2.70 | 2.31 | 1.80 | 1.65 | 2.87 | 0.43 | −1.92 | 0.2253 |
| 334 | 474926.11 | 2512203 | −2.26 | −1.87 | −1.29 | −2.54 | −1.93 | −0.84 | 0.00 | 0.1128 |
| 335 | 406804.4 | 3130454 | 2.03 | 0.58 | 2.65 | 1.63 | 1.70 | 2.05 | | |
| 336 | 480855.1 | 3234063 | 1.61 | 1.70 | 1.17 | 2.17 | 2.07 | 0.63 | | |
| 337 | 238593.5 | 211779 | −2.17 | 1.19 | −1.94 | −1.04 | 0.20 | −2.63 | | |
| 338 | 373514.7 | 4740251 | −1.89 | 2.29 | −2.76 | −1.35 | 0.63 | −2.22 | | |
| 339 | 1383354.10 | 5057204 | 0.89 | 0.38 | 1.58 | 1.41 | 2.01 | 1.26 | | |
| 340 | 3120070CB1 | 3120070 | −3.43 | −2.34 | −1.65 | −3.95 | −2.15 | −0.58 | −0.48 | 0.0067 |
| 341 | 253987.19 | 2232658 | 1.26 | −0.38 | 1.07 | 0.76 | 2.17 | 1.51 | 1.68 | 0.2104 |
| 342 | 133425.16 | 3510656 | 1.29 | 1.29 | 0.72 | 2.03 | 1.74 | 1.32 | 1.00 | 0.4025 |
| 343 | 468221.18 | 1662856 | −1.34 | −1.26 | −1.17 | −1.77 | −0.84 | −0.43 | | |
| 344 | 020093.8 | 2102756 | 2.47 | 1.78 | 0.68 | 2.17 | 1.77 | 0.48 | 2.09 | 0.6523 |
| 345 | 1556751CB1 | 1986121 | 1.35 | 0.96 | 1.35 | 1.65 | 1.49 | 1.10 | 0.96 | 0.0587 |
| 346 | 1397976.1 | 4628258 | 1.74 | 1.34 | 1.92 | 1.19 | 2.28 | 0.26 | | |
| 347 | 233828.16 | 1362831 | 1.68 | 0.43 | 1.82 | 1.92 | 2.13 | 1.29 | 2.15 | 0.8343 |
| 348 | 1253414CB1 | 5681633 | 1.07 | 0.48 | 1.59 | 1.74 | 1.74 | 1.23 | | |
| 349 | 1101068.1 | 5856402 | 1.74 | 0.77 | 2.36 | 1.45 | 1.72 | 1.26 | | |
| 350 | 006922.1 | 2934515 | 1.17 | 0.07 | 1.91 | 0.89 | 1.06 | 1.06 | | |
| 351 | 333398.5 | 2456903 | 1.96 | 0.26 | 1.91 | 1.28 | 1.87 | 1.26 | 1.10 | 0.4498 |
| 352 | 235725.21 | 2095728 | −1.74 | −2.17 | 0.07 | −1.65 | −1.20 | −0.68 | 0.53 | 0.2272 |
| 353 | 242472.14 | 4572916 | −2.25 | −2.90 | −1.84 | −1.13 | 0.14 | −1.00 | | |
| 354 | 253550.20 | 3397390 | −1.14 | 0.88 | −1.74 | −2.55 | −0.43 | −2.02 | −1.37 | 0.3441 |
| 355 | 216262.3 | 3813934 | −0.20 | −5.50 | −1.32 | 2.03 | −0.63 | −2.91 | −1.17 | 0.5725 |
| 356 | 235191.3 | 1997915 | −1.35 | −1.94 | −1.23 | −3.06 | −2.97 | −1.43 | −0.43 | 0.1838 |
| 357 | 480337.45 | 4602215 | −1.38 | −2.02 | −0.63 | −3.10 | −2.00 | −1.26 | | |
| 358 | 199939.6 | 1858415 | −1.46 | −1.87 | −0.68 | −1.65 | −2.54 | −0.57 | 0.51 | 0.1443 |
| 359 | 201204.9 | 4088394 | −1.56 | −2.09 | −0.37 | −0.63 | −1.91 | −1.07 | −0.07 | 0.3432 |
| 360 | 201887.2 | 3478024 | −1.41 | −1.14 | −0.26 | −1.59 | −1.35 | −0.72 | | |
| 361 | 1136056.1 | 3527982 | 1.10 | 1.35 | 2.88 | 5.45 | 4.68 | 2.17 | 0.85 | 0.2166 |
| 362 | 994977.1 | 3722056 | −2.50 | −0.72 | −2.24 | −2.57 | 0.26 | −2.22 | −0.68 | 0.9224 |
| 363 | 888669.8 | 4721466 | −1.29 | −1.23 | −0.20 | −2.36 | −1.74 | −0.37 | | |
| 364 | 345860.20 | 5160686 | 2.00 | 1.79 | 1.04 | 2.10 | 2.36 | 1.29 | | |
| 365 | 480337.43 | 1459082 | −1.29 | −1.70 | −0.53 | −2.87 | −1.65 | −1.23 | −0.14 | 0.2945 |
| 365 | 480337.43 | 4602215 | −1.38 | −2.02 | −0.63 | −3.10 | −2.00 | −1.26 | | |
| 366 | 399300.14 | 2842978 | 1.46 | −0.07 | 1.61 | 0.43 | 1.43 | 1.07 | 2.10 | 0.4263 |
| 367 | 368015.2 | 3115792 | −1.04 | −2.43 | −1.68 | −0.43 | 0.85 | −1.17 | | |
| 368 | 227550.1 | 3771020 | −1.85 | 1.56 | −2.42 | −1.56 | 0.43 | −2.03 | | |
| 369 | 201906.6 | 3733666 | 1.78 | 1.68 | 1.23 | −1.20 | 0.07 | 1.26 | | |
| 370 | 349589.10 | 127321 | −2.18 | 2.30 | −2.60 | −1.32 | 0.14 | −2.89 | −1.61 | 0.2318 |
| 371 | 3713867CB1 | 2061401 | 2.17 | 1.51 | 1.43 | 1.56 | 1.94 | 0.14 | | |
| 372 | 235943.27 | 2957567 | 2.34 | 2.70 | 1.79 | 2.79 | 3.08 | 1.13 | −0.14 | 0.16 |
| 373 | 241742.1 | 1295905 | 0.85 | 0.00 | 1.17 | 1.35 | 1.68 | 1.23 | | |
| 374 | 333680.1 | 3138456 | 1.79 | 1.00 | 1.32 | 0.69 | 1.68 | 1.17 | 1.70 | 0.7134 |
| 375 | 411429.3 | 1424886 | −1.70 | −3.09 | −0.38 | −2.13 | −1.00 | −1.20 | | |
| 376 | 2356055CB1 | 2356055 | 1.58 | 0.58 | 1.65 | 1.94 | 1.26 | 1.69 | 0.46 | 0.69 |
| 377 | 239579.3 | 1704713 | 1.29 | 0.53 | 1.22 | 1.09 | 1.35 | 0.42 | 1.72 | 0.9747 |
| 378 | 332240.1 | 2201507 | −2.12 | −2.89 | −1.07 | −2.36 | −2.10 | −1.72 | | |
| 379 | 255161.1 | 2270986 | 1.32 | 1.82 | 0.20 | 1.29 | 1.32 | 0.85 | 1.49 | 0.9652 |
| 380 | 2454384CB1 | 2454384 | 2.24 | −0.53 | 1.93 | 0.96 | 1.17 | 1.83 | | |
| 381 | 1383298.3 | 1510539 | 1.86 | 1.04 | 0.63 | 0.77 | 2.45 | 1.22 | 2.22 | 0.6032 |
| 382 | 383376.7 | 5551761 | 1.70 | 0.76 | 1.29 | 2.25 | 1.60 | 1.14 | 0.38 | 0.2398 |
| 383 | 230816.1 | 1526322 | −1.94 | 1.54 | −2.32 | −1.41 | 0.20 | −2.14 | | |
| 384 | 211949.2 | 1966295 | 1.50 | 0.58 | 1.35 | 1.14 | 1.55 | 0.77 | | |
| 385 | 238853.42 | 1450886 | −2.03 | −1.43 | −2.12 | −3.00 | 1.83 | −1.14 | | |
| 386 | 333165.2 | 1682337 | 1.38 | 1.26 | 0.76 | 1.14 | 1.65 | 0.00 | | |
| 387 | 344868.12 | 3333118 | −0.48 | −1.04 | −1.00 | −1.07 | −1.51 | −1.23 | | |
| 388 | 148304.14 | 3646303 | 2.28 | 1.35 | 1.87 | 1.16 | 1.18 | 1.14 | | |
| 389 | 247747.6 | 3124204 | −1.70 | −2.25 | −0.14 | −1.80 | −1.98 | −0.58 | | |
| 390 | 001153.12 | 5546984 | 1.26 | 0.72 | 1.46 | 1.17 | −1.14 | 0.68 | 1.72 | 0.5264 |
| 391 | 1095728.19 | 414480 | −1.69 | −2.96 | −0.63 | −1.04 | 0.43 | −2.08 | −0.81 | 0.7753 |
| 392 | 222604.7 | 2745735 | −1.51 | −1.10 | −0.89 | −2.36 | −1.98 | −1.00 | | |
| 393 | 1094984.14 | 2620487 | −1.14 | −2.80 | −1.26 | −2.07 | 0.26 | −1.07 | | |
| 394 | 400702.1 | 1969974 | 1.94 | 0.67 | 1.35 | 1.45 | 0.63 | 2.02 | | |
| 395 | 196557.1 | 1927026 | 0.88 | 0.58 | 1.83 | 1.35 | 1.83 | 1.20 | | |
| 396 | 237208.5 | 993365 | −1.70 | −1.72 | −0.48 | −2.12 | −1.31 | −0.38 | | |
| 397 | 337792.2 | 1832594 | −1.63 | −1.92 | −0.43 | −1.53 | −1.35 | −1.04 | | |
| 398 | 398970.3 | 4885619 | 2.24 | 1.78 | 1.07 | 0.87 | 1.10 | 0.94 | 1.38 | 0.5002 |
| 399 | 1309633.3 | 1880421 | −1.04 | −1.29 | −0.43 | 0.12 | −1.89 | −1.40 | | |
| 400 | 981662.1 | 4401727 | −1.10 | −1.22 | −0.72 | −1.98 | −1.60 | −0.53 | | |
| 401 | 081187.1 | 2416447 | −0.77 | −1.38 | −0.63 | −1.61 | −3.32 | −1.20 | −1.59 | 0.7885 |
| 402 | 086533.6 | 219839 | 1.20 | 0.48 | 1.56 | 2.59 | 1.59 | 1.23 | 0.53 | 0.3019 |
| 403 | 1093481.2 | 1962139 | 1.41 | 0.53 | 1.92 | 1.87 | 2.46 | 1.38 | | |
| 404 | 024494.7 | 1938744 | 1.20 | 0.42 | 1.54 | 1.26 | 1.68 | 1.07 | | |
| 405 | 888669.7 | 4721466 | −1.29 | −1.23 | −0.20 | −2.36 | −1.74 | −0.37 | | |
| 406 | 428206.1 | 2675284 | 1.77 | 0.76 | 1.87 | 0.76 | 1.42 | 1.74 | | |
| 407 | 1328026.7 | 549728 | −5.13 | −1.58 | −2.00 | −5.75 | 0.00 | −0.14 | | |
| 408 | 475113.7 | 1700462 | −1.17 | −1.20 | −0.88 | −1.26 | −1.85 | −0.53 | | |
| 409 | 204392.5 | 2950394 | 2.15 | 1.17 | 0.63 | 0.92 | 1.65 | 1.06 | 1.29 | 0.6786 |
| 410 | 1092257.12 | 3440567 | 1.35 | 0.85 | 1.40 | 1.44 | 1.63 | 2.01 | 1.04 | 0.762 |
| 411 | 1134990.3 | 3878116 | 2.72 | 1.07 | 1.58 | 1.83 | 1.93 | 1.56 | 1.26 | 0.2347 |
| 412 | 1095223.13 | 4158982 | −1.10 | −1.83 | −0.38 | −1.43 | −2.51 | −1.14 | | |
| 413 | 214654.1 | 1681727 | 1.96 | 0.58 | 1.56 | 0.63 | 1.67 | 1.14 | | |
| 414 | 086533.5 | 219839 | 1.20 | 0.48 | 1.56 | 2.59 | 1.59 | 1.23 | 0.53 | 0.3019 |
| 415 | 474117.5 | 3992320 | −1.35 | −1.40 | −0.43 | −1.43 | −1.29 | −0.88 | 0.13 | 0.3335 |
| 416 | 410812.1 | 3380665 | −1.54 | −1.17 | −1.46 | −0.96 | −0.48 | −1.98 | | |
| 417 | 011822.2 | 2887646 | −1.26 | −2.43 | −0.81 | −1.43 | −1.38 | −0.58 | | |
| 418 | 252899.7 | 2811710 | 1.58 | 0.58 | 1.85 | 1.74 | 1.65 | 1.41 | | |
| 419 | 1511488CB1 | 1511488 | 1.96 | 0.76 | 0.94 | 1.03 | 1.90 | 1.58 | | |
| 420 | 1383797.1 | 1466844 | −3.12 | 2.44 | −4.14 | −1.82 | 0.00 | −4.01 | | |
| 421 | 400745.1 | 4205017 | 1.93 | 1.68 | 1.46 | 1.20 | 0.92 | 1.29 | | |
| 422 | 029618.1 | 1223877 | −1.14 | −1.13 | −0.51 | −1.51 | −1.15 | −0.77 | | |
| 423 | 245722.8 | 2508079 | −1.46 | −1.43 | 0.48 | −2.07 | 2.09 | 0.43 | | |
| 424 | 981488.1 | 2159213 | 1.56 | 0.58 | 1.56 | 1.63 | 0.77 | 1.09 | | |
| 424 | 981488.1 | 2449016 | 1.32 | 0.13 | 1.17 | 1.56 | 1.56 | 1.07 | | |
| 425 | 241858.1 | 4460483 | 1.70 | 1.35 | 1.23 | 1.78 | 1.38 | 1.34 | | |
| 426 | 1466276CB1 | 739191 | −1.60 | −1.31 | −0.48 | −2.52 | −2.25 | −0.72 | 0.81 | 0.2291 |
| 427 | 999386.3 | 5286390 | 1.90 | 1.10 | 1.89 | 1.34 | 1.93 | 1.20 | 1.94 | 0.8975 |
| 428 | 1091079.8 | 1503624 | 1.70 | 0.53 | 1.94 | 2.29 | 2.27 | 1.78 | | |
| 429 | 407084.1 | 3423374 | 1.85 | 1.59 | 1.23 | 2.68 | 1.58 | 1.43 | 0.63 | 0.2599 |
| 430 | 215642.2 | 1923709 | −1.26 | −1.03 | −0.95 | −1.70 | 0.00 | −1.86 | | |
| 431 | 1159769.1 | 3929017 | 1.87 | 0.89 | 1.26 | −0.32 | 2.72 | 1.54 | | |
| 432 | 482336.31 | 4104390 | 1.51 | 1.31 | 1.35 | 1.62 | 1.46 | −0.38 | 0.43 | 0.1705 |
| 433 | 064703.1 | 1900111 | −2.26 | −1.87 | −1.63 | −1.77 | −0.63 | −2.61 | | |
| 434 | 294837.1 | 3255489 | −1.93 | 1.48 | 1.07 | 0.63 | 1.56 | 0.72 | | |
| 435 | 982699.1 | 5394922 | −1.91 | −1.06 | −2.00 | −2.51 | −0.99 | −1.56 | | |
| 436 | 015126.1 | 4361169 | −1.76 | −1.69 | −1.23 | −2.62 | −0.07 | 0.07 | | |
| 437 | 235132.10 | 5682290 | −1.79 | −2.64 | −2.93 | −3.24 | −2.51 | −1.32 | | |
| 438 | 1070092.1 | 2965648 | −1.41 | 1.07 | 1.23 | 1.14 | 1.60 | 0.93 | | |
| 439 | 272599.1 | 2278772 | −0.20 | −1.46 | −1.72 | −1.37 | −1.64 | −2.07 | | |
| 440 | 415901.1 | 2998131 | −1.70 | 0.95 | −1.89 | −1.46 | 0.07 | −1.85 | | |
| 441 | 477387.3 | 3100048 | −1.00 | −0.53 | −1.40 | −1.74 | −1.67 | −1.48 | | |
| 442 | 208702.1 | 3658444 | 1.23 | 1.07 | 1.29 | 0.53 | 2.48 | 0.63 | | |
| 443 | 1135039.1 | 899118 | 2.23 | 2.12 | 2.20 | 3.04 | 3.20 | 1.10 | | |
| 444 | 232649.2 | 2234640 | 1.45 | 1.07 | 1.59 | 0.38 | 1.17 | 1.70 | | |
| 445 | 340450.1 | 4639995 | −1.72 | −1.23 | −0.38 | −2.45 | −1.23 | −0.48 | | |
| 446 | 320660.1 | 5034026 | 1.51 | 1.16 | 1.26 | 1.79 | 2.02 | 1.51 | | |
| 447 | 467104.21 | 2054055 | −1.80 | −1.87 | −1.37 | −1.74 | 0.06 | −0.07 | | |
| 448 | 332382.1 | 3999569 | −1.26 | −1.28 | −0.77 | −2.66 | −0.81 | 0.20 | | |
| 449 | 2104530CB1 | 2104530 | −1.20 | −1.41 | −0.48 | −1.51 | −1.07 | −1.20 | | |
| 450 | 007228.1 | 60306 | 1.79 | 0.68 | 1.80 | 1.30 | 1.70 | 1.68 | | |
| 451 | 008098.1 | 313312 | 1.23 | 2.64 | 0.00 | 0.00 | 2.00 | 1.56 | | |
| 452 | 016124.2 | 3732960 | 1.77 | 2.29 | 0.26 | 1.89 | 1.89 | 1.48 | | |
| 453 | 016149.1 | 3736058 | −2.38 | −3.19 | 0.37 | 0.68 | −0.72 | −1.51 | | |
| 454 | 025731.1 | 2586554 | 1.48 | −0.96 | 0.63 | 1.04 | 2.46 | 1.23 | | |
| 455 | 026856.1 | 1300730 | −1.32 | 0.91 | −2.24 | −1.29 | 0.20 | −1.38 | | |
| 456 | 028918.1 | 2800380 | 1.23 | 0.87 | 1.07 | 1.53 | 1.92 | 0.14 | | |
| 457 | 032481.1 | 4073339 | −1.85 | −1.75 | 0.00 | −2.63 | −2.26 | −0.58 | | |
| 458 | 045630.1 | 1269876 | −1.98 | −0.74 | −1.58 | −1.46 | −0.85 | −1.94 | | |
| 459 | 047533.1 | 4276910 | −1.85 | −1.77 | −1.17 | −2.47 | −0.13 | −2.12 | | |
| 460 | 072540.1 | 2152929 | 1.46 | 0.81 | 1.40 | 0.93 | 1.07 | 1.54 | | |
| 461 | 076580.1 | 2264967 | −1.54 | −1.51 | −1.20 | −1.56 | 0.06 | −2.03 | | |
| 462 | 1072776.1 | 5505238 | −1.20 | −3.29 | −1.14 | −2.00 | 0.26 | −1.26 | | |
| 463 | 1100233.1 | 3725970 | −2.40 | 1.94 | −2.85 | −1.43 | 0.26 | −2.72 | | |
| 464 | 1102220.2 | 1299351 | 1.10 | −1.23 | 1.00 | 1.58 | 1.08 | −0.14 | | |
| 465 | 1328508.1 | 2669974 | 1.23 | 0.42 | 1.20 | 1.41 | 1.49 | 0.76 | | |
| 466 | 1383457.1 | 5024278 | −1.61 | −0.13 | −2.25 | −1.58 | −1.10 | −1.07 | | |
| 467 | 140230.5 | 1211835 | 1.60 | 0.43 | 2.17 | 1.60 | 2.41 | 0.88 | | |
| 468 | 150868.1 | 491129 | −1.40 | −0.07 | 0.34 | −2.55 | −1.07 | −0.63 | | |
| 469 | 172582.1 | 5622463 | 1.59 | 0.92 | 1.73 | 1.43 | 1.41 | 1.29 | | |
| 470 | 175536.1 | 122943 | 1.67 | −0.42 | 2.02 | 1.59 | 1.98 | 1.12 | | |
| 470 | 175536.1 | 5187276 | 3.17 | 0.37 | 2.63 | 2.17 | 2.40 | 2.38 | | |
| 471 | 176928.1 | 2782090 | −1.26 | −1.72 | −1.15 | −1.96 | −2.09 | −1.46 | | |
| 472 | 197252.1 | 2656358 | −2.56 | −1.89 | −1.41 | −2.86 | −0.31 | −0.85 | | |
| 473 | 1975480CB1 | 3852527 | 1.20 | 0.89 | 1.92 | 1.46 | 1.68 | 1.14 | | |
| 474 | 200578.1 | 473724 | −2.91 | −1.29 | −0.13 | −3.01 | 0.00 | −3.35 | | |
| 475 | 202117.4 | 1402988 | 2.18 | 0.47 | 1.85 | 1.48 | 2.50 | 1.93 | | |
| 476 | 204750.3 | 2021485 | 1.93 | 1.61 | 1.29 | 1.88 | 2.51 | 0.93 | | |
| 477 | 205232.1 | 1379153 | 1.01 | 2.35 | 1.01 | −0.32 | 1.99 | 1.51 | | |
| 478 | 212157.1 | 3130003 | 1.71 | −0.26 | 1.26 | 0.81 | 1.70 | 1.10 | | |
| 479 | 221846.4 | 4116336 | 1.98 | 0.37 | 1.53 | 1.32 | 2.01 | 1.68 | | |
| 480 | 222092.1 | 2154847 | 0.96 | 1.17 | 1.26 | 1.89 | 1.26 | 0.72 | | |
| 481 | 228350.1 | 2605849 | 2.35 | 2.29 | 1.65 | 2.17 | 2.51 | 1.04 | | |
| 482 | 229170.1 | 1818484 | 1.78 | 0.80 | 1.96 | 2.36 | 2.60 | 1.54 | | |
| 483 | 230820.1 | 3120378 | −1.46 | −1.67 | −0.81 | −1.03 | −1.48 | −2.03 | | |
| 484 | 231160.1 | 1848676 | 1.15 | −0.48 | 1.79 | 1.27 | 1.95 | 0.68 | | |
| 485 | 232212.1 | 1866738 | 1.60 | −0.26 | 1.92 | 1.26 | 1.15 | 0.37 | | |
| 486 | 234090.1 | 1718918 | 1.40 | 0.53 | 1.63 | 0.68 | 1.96 | 1.43 | | |
| 487 | 236432.1 | 3322032 | 2.00 | 0.72 | 0.20 | 1.77 | 2.98 | 1.20 | | |
| 488 | 236497.1 | 1682609 | −1.38 | 0.26 | −1.41 | −1.07 | 0.07 | −1.54 | | |
| 489 | 237208.4 | 993365 | −1.70 | −1.72 | −0.48 | −2.12 | −1.31 | −0.38 | | |
| 490 | 2484813CB1 | 1338090 | 2.88 | 2.67 | 2.25 | 3.21 | 3.10 | 0.85 | 1.17 | 0.0027 |
| 491 | 249104.1 | 2394947 | 2.11 | 1.29 | 2.09 | 1.53 | 2.06 | 2.20 | | |
| 492 | 287241.1 | 3412108 | 1.43 | 0.26 | 1.74 | 1.27 | 1.63 | 0.96 | | |
| 493 | 316571.1 | 5185101 | 2.02 | 1.59 | 1.56 | 1.48 | 0.98 | 2.43 | | |
| 494 | 331447.1 | 3363538 | −1.72 | −2.08 | −1.76 | −1.32 | 0.00 | −1.46 | | |
| 495 | 333127.1 | 153430 | −0.81 | −0.14 | −1.14 | −0.19 | −1.97 | −1.07 | | |
| 496 | 334025.5 | 3724351 | 2.01 | 1.60 | 0.68 | 1.80 | 1.29 | 0.63 | 1.20 | 0.242 |
| 497 | 334570.1 | 1296146 | 1.58 | 1.04 | 1.80 | 0.50 | 1.56 | 1.49 | | |
| 498 | 334814.1 | 1645745 | −1.72 | −1.96 | −0.87 | −1.58 | −1.70 | −0.72 | | |
| 499 | 335692.1 | 5023108 | −1.83 | 1.76 | −2.07 | −1.14 | −0.07 | −1.91 | | |
| 500 | 337407.1 | 3518117 | −1.29 | −1.53 | 0.00 | −2.12 | −1.20 | −0.63 | | |
| 501 | 337953.2 | 1378835 | 1.31 | 2.24 | 1.99 | 0.72 | 1.16 | 1.12 | | |
| 502 | 337953.5 | 1378835 | 1.31 | 2.24 | 1.99 | 0.72 | 1.16 | 1.12 | | |
| 503 | 346431.1 | 2723937 | 1.40 | 0.68 | 2.03 | 1.91 | 1.62 | 1.29 | | |
| 504 | 368357.1 | 5085077 | −2.46 | 0.65 | −1.58 | −1.16 | 0.00 | −2.56 | | |
| 505 | 390546.1 | 5339122 | 1.54 | 0.72 | 1.41 | 0.77 | 1.47 | 1.35 | | |
| 506 | 400267.1 | 4240272 | 1.63 | 1.17 | 0.43 | 2.19 | 2.19 | 0.72 | | |
| 507 | 402288.1 | 3871646 | −1.48 | 0.31 | −1.79 | −1.29 | 0.00 | −1.00 | | |
| 508 | 403407.2 | 1316042 | −1.03 | 1.56 | 1.35 | 0.92 | 1.98 | 0.96 | | |
| 509 | 405447.1 | 3220727 | −2.23 | −0.19 | 0.00 | −2.49 | 0.00 | −1.20 | | |
| 510 | 407485.1 | 5552541 | 1.03 | 1.07 | 2.48 | 2.08 | 1.74 | 0.85 | | |
| 511 | 427832.19 | 3692235 | −2.67 | 2.89 | −3.48 | −1.68 | 0.00 | −3.34 | | |
| 512 | 477913.1 | 2593092 | 0.85 | 1.35 | 1.03 | 1.10 | 1.98 | 1.79 | | |
| 513 | 902956.2 | 2607572 | −1.98 | 0.85 | −2.17 | −1.20 | −0.14 | −2.23 | | |
| 514 | 979367.4 | 2998372 | 0.85 | −0.38 | 1.54 | 1.50 | 1.81 | 1.07 | | |
| 515 | 979367.5 | 2998372 | 0.85 | −0.38 | 1.54 | 1.50 | 1.81 | 1.07 | | |
| 516 | 982861.1 | 3888854 | −2.26 | 2.40 | −3.00 | −1.07 | 0.48 | −2.70 | | |
| 517 | 983351.1 | 1819244 | 2.43 | 0.37 | 3.20 | 2.06 | 2.71 | 1.96 | | |
| 518 | 984637.1 | 1610772 | −2.52 | 1.77 | −2.94 | −1.65 | 0.26 | −3.06 | | |
| 519 | 984900.1 | 1802185 | −1.26 | −1.51 | −0.53 | −1.85 | −2.00 | −1.22 | | |

[0174] TABLE 2

| SEQ | | | | | |
|---|---|---|---|---|---|
| ID NO | Template ID | Clone ID | Genbank ID | E−value | Homolog Description |
| 1 | 1867417CB1 | 1357231 | g2668414 | 0 | topoisomersae II [Sus scrofa] |
| 2 | 1970111CB1 | 1970111 | g286013 | 0 | KIAA0008 [Homo sapiens] |
| 3 | 959142CB1 | 1930447 | g2995138 | 0 | thrombospondin 2 [Bos taurus] |
| 4 | 064684.7 | 1824717 | g3413861 | 0 | Homo sapiens mRNA for KIAA0450 protein, complete cds. |
| 5 | 245093.34 | 958486 | g393319 | 0 | osteoblast specific factor 2 [Homo sapiens] |
| 6 | 331908.5 | 1995457 | g63114 | 0 | B-cadherin [Gallus gallus] |
| 7 | 1329880.35 | 5150602 | g30058 | 1.00E−142 | prepro-alpha-1 type 3 collagen [Homo sapiens] |
| 8 | 963555.1 | 2820294 | g30058 | 1.00E−140 | prepro-alpha-1 type 3 collagen [Homo sapiens] |
| 9 | 199471.2 | 2047549 | g1575534 | 1.00E−112 | Mad2 [Homo sapiens] |
| 10 | 048849.1 | 1358605 | g5669134 | 6.00E−37 | Homo sapiens constitutive fragile region FRA3B sequence. |
| 11 | 278283.1 | 4180161 | g29584 | 3.00E−12 | Human mRNA for alpha 1 (III) collagen fragment (aa 892-1023). |
| 12 | 978433CB1 | 1869068 | g2088834 | 1.00E−05 | F59E12.12 gene product [Caenorhabditis elegans] |
| 13 | 611514CB1 | 605219 | g1374792 | 0 | selenium-binding protein [Homo sapiens] |
| 14 | 1382907.35 | 1888708 | g165490 | 0 | myosin heavy chain [Oryctolagus cuniculus] |
| 15 | 350509.2 | 1510413 | g1699038 | 0 | ABC3 [Homo sapiens] |
| 16 | 2512879CB1 | 2512879 | g178092 | 0 | alcohol dehydrogenase 1 [Homo sapiens] |
| 17 | 241123.1 | 3876732 | g1834493 | 0 | flavin-containing monooxygenase 2 [Homo sapiens] |
| 18 | 247817.4 | 1480063 | g186675 | 0 | receptor tyrosine kinase [Homo sapiens] |
| 19 | 1674368CB1 | 1241484 | g188676 | 0 | mannose receptor precursor [Homo sapiens] |
| 20 | 343963.1 | 2671006 | g1907329 | 0 | angiopoietin-1 [Mus musculus] |
| 21 | 273154CB1 | 2899786 | g202592 | 0 | prealpha-2-macroglobulin [Rattus norvegicus] |
| 22 | 331508.4 | 1967759 | g2222794 | 0 | VE−Cadherin [Sus scrofa] |
| 23 | 1137924.1 | 1480479 | g2337883 | 0 | pyruvate dehydrogenase kinase isoform 4 [Homo sapiens] |
| 24 | 247168.4 | 2278925 | g2338748 | 0 | oxidoreductase [Homo sapiens] |
| 25 | 2275817CB1 | 224996 | g2853224 | 0 | skeletal muscle LIM-protein FHL1 [Homo sapiens] |
| 26 | 2717806CB1 | 4918603 | g29721 | 0 | catalase (aa 1-527) [Homo sapiens] |
| 27 | 407624.1 | 3771805 | g3360425 | 0 | Homo sapiens clone 23822 mRNA sequence. |
| 28 | 3950154CB1 | 2748163 | g34383 | 0 | precursor protein [Homo sapiens] |
| 29 | 3741842CB1 | 1988080 | g3676522 | 0 | prostaglandin transporter [Homo sapiens] |
| 30 | 221055.4 | 2718391 | g4092861 | 0 | p53 regulated PA26-T3 nuclear protein [Homo sapiens] |
| 31 | 379425CB1 | 433622 | g409977 | 0 | nontransmembrane protein tyrosine phosphatase, ERP [mice, liver, Peptide, |
| | | | | | 367 aa][Mus sp.] |
| 32 | 1685090CB1 | 2721792 | g4585372 | 0 | Wnt inhibitory factor-1 [Mus musculus] |
| 33 | 350476.1 | 123312 | g4588918 | 0 | serotonin transporter [Bos taurus] |
| 33 | 350476.1 | 4044520 | g4588918 | 0 | serotonin transporter [Bos taurus] |
| 34 | 404278.1 | 3116479 | g4884242 | 0 | Homo sapiens mRNA; cDNA DKFZp564G112 (from clone DKFZp564G112). |
| 35 | 1250492CB1 | 1361644 | g547484 | 0 | sodium-dependent phosphate transporter [Bos taurus] |
| 36 | 200095.2 | 3125685 | g547484 | 0 | sodium-dependent phosphate transporter [Bos taurus] |
| 37 | 997405.3 | 1240444 | g6006498 | 0 | dTDP-4-keto-6-deoxy-D-glucose 4-reductase [Homo sapiens] |
| 38 | 235369.10 | 1965041 | g6468391 | 0 | dJ365O12.1 (KIAA0758 protein) [Homo sapiens] |
| 39 | 236587.4 | 1362125 | g6572260 | 0 | bK65A6.2 (novel Sushi domain (SCR repeat) containing protein |
| | | | | | similar to Mucins) (Homo sapiens] |
| 40 | 1135936.1 | 4271973 | g6599288 | 0 | Homo sapiens mRNA; cDNA DKFZp586A0421 |
| | | | | | (from clone DKFZp586A0421). |
| 41 | 251123.6 | 3557441 | g6636099 | 0 | NADH/NADPH thyroid oxidase p138-tox [Homo sapiens] |
| 41 | 251123.6 | 2600963 | g6636099 | 0 | NADH/NADPH thyroid oxidase p138-tox [Homo sapiens] |
| 42 | 2547002CB1 | 2475740 | g7363342 | 0 | chemokine receptor [Homo sapiens] |
| 43 | 251123.8 | 3557441 | g8163932 | 0 | NADPH thyroid oxidase 2 [Canis familiaris] |
| 44 | 1000172.35 | 3645309 | g338048 | 1.00E−180 | Human pulmonary surfactant-associated protein |
| | | | | | SP-A (SFTP1) gene, complete cds. |
| 45 | 2921920CB1 | 1498363 | g7019846 | 1.00E−159 | unnamed protein product [Homo sapiens] |
| 46 | 631645CB1 | 1274935 | g1655592 | 1.00E−152 | folate receptor [Homo sapiens] |
| 46 | 631645CB1 | 1577756 | g1655592 | 1.00E−152 | folate receptor [Homo sapiens] |
| 47 | 1507546CB1 | 3507734 | g292507 | 1.00E−144 | surfactant protein D [Homo sapiens] |
| 48 | 1508437CB1 | 1376121 | g1483627 | 1.00E−140 | folate receptor [Homo sapiens] |
| 48 | 1508437CB1 | 1607091 | g1483627 | 1.00E−140 | folate receptor [Homo sapiens] |
| 49 | 1100669.4 | 1675122 | g825722 | 1.00E−116 | tetranectin [Homo sapiens] |
| 50 | 124600CB1 | 1578941 | g1203984 | 1.00E−108 | NAD +− dependent 15-hydroxyprostaglandin dehydrogenase [Homo sapiens] |
| 51 | 470771.11 | 322066 | g190856 | 1.00E−100 | GTPase activating protein [Homo sapiens] |
| 52 | 273259.4 | 2201411 | g7768703 | 5.00E−93 | Homo sapiens genomic DNA, chromosome 21q, section 38/105. |
| 53 | 5170638CB1 | 4014022 | g339946 | 2.00E−81 | slow twitch skeletal/cardiac muscle troponin C [Homo sapiens] |
| 54 | 1330170.3 | 4221057 | g4038450 | 1.00E−77 | alpha one globin [Homo sapiens] |
| 55 | 1383898.2 | 1499549 | g184834 | 1.00E−76 | insulin-like growth factor [Homo sapiens] |
| 56 | 019238.3 | 1430507 | g6841220 | 3.00E−73 | HSPC285 [Homo sapiens] |
| 57 | 1102296.5 | 3026658 | g4038450 | 5.00E−73 | alpha one globin [Homo sapiens] |
| 58 | 995673.3 | 2149968 | g403S450 | 9.00E−71 | alpha one globin [Homo sapiens] |
| 58 | 995673.3 | 4215545 | g4038450 | 9.00E−71 | alpha one globin [Homo sapiens] |
| 59 | 312256CB1 | 313697 | g4519602 | 3.00E−59 | IGSF4 [Homo sapiens] |
| 60 | 199183.2 | 2763310 | g6652812 | 2.00E−55 | putative secreted protein XAG [Homo sapiens] |
| 61 | 289671.40 | 3678546 | g7230514 | 2.00E−55 | extracellular glutathione peroxidase [Homo sapiens] |
| 62 | 154403.1 | 2050104 | g530140 | 7.00E−50 | Homo sapiens iduronate sulphate sulphatase (IDS) gene, |
| | | | | | complete cds. |
| 63 | 086518.22 | 1987759 | g6137108 | 5.00E−47 | RGC32 Homo sapiens] |
| 64 | 1383156.10 | 311197 | g262770 | 2.00E−43 | type II surfactant protein C, type II SP-C [rabbits, lung, Peptide, |
| | | | | | 189 aa] [Oryctolagus cuniculus] |
| 65 | 1100669.3 | 1675122 | g825722 | 4.00E−41 | tetranectin [Homo sapiens] |
| 66 | 1330148.1 | 3867795 | g386765 | 7.00E−36 | hba1 alpha globin [Homo sapiens] |
| 67 | 1436702CB1 | 1358185 | g180501 | 5.00E−30 | channel-like integral membrane protein [Homo sapiens] |
| 68 | 3141226CB1 | 3625857 | g183629 | 2.00E−29 | cytokine gro-beta [Homo sapiens] |
| 69 | 289671.44 | 970905 | g2654264 | 8.00E−29 | glutathione peroxidase [Homo sapiens] |
| 70 | 197927.7 | 2417149 | g8176600 | 1.00E−16 | Homo sapiens TCL6 gene, exon 11. |
| 71 | 1134834.2 | 1911306 | g5714696 | 7.00E−14 | alpha 2 delta calcium channel subunit [Mus musculus] |
| 72 | 200273.1 | 2721144 | g7229101 | 1.00E−10 | down-regulated in gastric cancer [Homo sapiens] |
| 73 | 477974.1 | 3117677 | g37519 | 9.00E−09 | H. sapiens U13 snRNA pseudogene U13.12A. |
| 74 | 235095.7 | 1809377 | g7529597 | 2.00E−07 | dJ402N21.2 (novel protein with MAM domain) [Homo sapiens] |
| 75 | 407593.1 | 205053 | | | Incyte Unique |
| 76 | 332301.1 | 1417150 | | | Incyte Unique |
| 77 | 407699.4 | 1919860 | | | Incyte Unique |
| 78 | 405501.1 | 2593077 | | | Incyte Unique |
| 79 | 482541.2 | 2685454 | | | Incyte Unique |
| 80 | 237026.3 | 2963374 | | | Incyte Unique |
| 81 | 443605.4 | 3556587 | | | Incyte Unique |
| 82 | 443605.1 | 53556587 | | | Incyte Unique |
| 83 | 029997.1 | 3638532 | | | Incyte Unique |
| 84 | 331743.9 | 789903 | g1136394 | 0 | There are three putative hydrophobic domains in the central region. |
| | | | | | [Homo sapiens] |
| 85 | 337334.1 | 3220029 | g155084 | 0 | kinesin-related protein [Homo sapiens] |
| 86 | 410438.2 | 1879818 | g1200247 | 0 | perforin [Mus musculus] |
| 87 | 453004.3 | 22394888 | g1246779 | 0 | calpain [Mus musculus] |
| 88 | 236319.2 | 3044230 | g1399032 | 0 | copper monamine oxidase [Homo sapiens] |
| 89 | 978118.5 | 2508618 | g1439565 | 0 | chitinase [Homo sapiens] |
| 90 | 1383177.16 | 1646505 | g1469874 | 0 | The KIAA0146 gene product is novel. [Homo sapiens] |
| 91 | 1383298.1 | 1510539 | g1490314 | 0 | peroxisome proliferator activated receptor gamma [Homo sapiens] |
| 92 | 1000222.20 | 1729693 | g1498255 | 0 | replication factor C, 37-kDa subunit [Homo sapiens] |
| 93 | 1096863.27 | 1303863 | g1519394 | 0 | leptin receptor [Homo sapiens] |
| 94 | 245334.1 | 2380412 | g1688258 | 0 | collagenase [Homo sapiens] |
| 95 | 1656674CB1 | 2222802 | g1698708 | 0 | mast cell carboxypeptidase A precursor [Rattus norvegicus] |
| 96 | 522678CB1 | 2199851 | g177205 | 0 | 92 kDa type IV collagenase [Homo sapiens] |
| 97 | 1424985CB1 | 2150615 | g1778069 | 0 | zyginI [Rattus norvegicus] |
| 98 | 1468237CB1 | 1573505 | g178277 | 0 | S-adenosylhomocysteine hydrolase [Homo sapiens] |
| 99 | 337008.1 | 1599272 | g180494 | 0 | butyrylcholinesterase (EC 3.1.1.8) [Homo sapiens] |
| 100 | 444850.9 | 2860704 | g183002 | 0 | guanylate binding protein isoform I [Homo sapiens] |
| 101 | 786284CB1 | 1458210 | g183138 | 0 | gamma-glutamyl transpeptidase (EC 2.3.2.2) [Homo sapiens] |
| 102 | 1352170CB1 | 11988092 | g187240 | 0 | leukocyte surface protein [Homo sapiens] |
| 103 | 1815320CB1 | 1742116 | g1899259 | 0 | CX3C chemokine precursor [Homo sapiens] |
| 104 | 331192.11 | 2007554 | g1903384 | 0 | preferentially expressed antigen of melanoma |
| | | | | | [Homo sapiens] |
| 105 | 344053.5 | 2928545 | g191992 | 0 | APC [Mus musculus] |
| 106 | 411188.2 | 4247796 | g202874 | 0 | AMPA selective glutamate receptor [Rattus norvegicus] |
| 107 | 331510.4 | 3814138 | g2071974 | 0 | phospholipase D1 [Cricetulus griseus] |
| 108 | 492750CB1 | 2732630 | g2125814 | 0 | serine/threonine protein kinase [Homo sapiens] |
| 109 | 348912.4 | 1716655 | g219936 | 0 | NCA-W272 [Homo sapiens] |
| 110 | 2680109CB1 | 2125020 | g255098 | 0 | transmembrane secretory component, SC, polyIg receptor [Homo sapiens] |
| 110 | 2680109CB1 | 2242677 | g255098 | 0 | transmembrane secretory component, SC, poly-Ig receptor [Homo sapiens] |
| 111 | 512261CB1 | 512261g | 2570531 | 0 | beta2-adrenergic receptor [Homo sapiens] |
| 112 | 232719.2 | 1848259 | g2582830 | 0 | alpha1 integrin [Gallus gallus] |
| 113 | 369664.2 | 3119171 | g2642133 | 0 | neuronal apoptosis inhibitory protein [Homo sapiens] |
| 114 | 021042.1 | 2879922 | g2735714 | 0 | Homo sapiens pro-alpha 2(I) collagen (COL1A2) gene, complete cds. |
| 115 | 418805.7 | 1637320 | g2735857 | 0 | cAMP-specific phosphodiesterase PDE4D5 [Homo sapiens] |
| 116 | 1094000.4 | 1397816 | g285926 | 0 | human endothelin-B receptor [Homo sapiens] |
| 117 | 1094000.5 | 1380927 | g285926 | 0 | human endothelin-B receptor [Homo sapiens] |
| 118 | 1222734CB1 | 1300701 | g285926 | 0 | human endothelin-B receptor [Homo sapiens] |
| 118 | 1222734CB1 | 1397816 | g285926 | 0 | human endothelin-B receptor [Homo sapiens] |
| 119 | 411205.5 | 1420883 | g2865521 | 0 | protein regulating cytokinesis 1; PRC1 [Homo sapiens] |
| 120 | 1092777.6 | 1643711 | g292823 | 0 | Homo sapiens receptor protein-tyrosine kinase (TEK) mRNA, complete cds. |
| 121 | 234358.5 | 1996180 | g293332 | 0 | ect2 [Mus musculus] |
| 122 | 1092777.7 | 1643711 | g296578 | 0 | receptor tyrosine kinase [Bos taurus] |
| 123 | 4180444CB1 | 3872317 | g3025335 | 0 | sucrase-isomaltase [Suncus murinus] |
| 124 | 1987983CB1 | 690819 | g3061284 | 0 | p67phox [Mus musculus] |
| 125 | 1398420.2 | 4655050 | g306799 | 0 | pregnancy-specific beta-glycoprotein e [Homo sapiens] |
| 126 | 1749102CB1 | 1749102 | g306956 | 0 | indoleamine 2,3-dioxygenase (IDO) (EC 1.13.11.17) |
| | | | | | [Homo sapiens] |
| 127 | 2965804CB1 | 2965804 | g309266 | 0 | glycerophosphate dehydrogenase [Mus musculus] |
| 128 | 210095.21 | 1285926 | g3172150 | 0 | BGPc_HUMAN [Homo sapiens] |
| 129 | 1555752CB1 | 42248 | g3192879 | 0 | MAD3-like protein kinase [Homo sapiens] |
| 130 | 110245.1 | 3028719 | g3213194 | 0 | Homo sapiens serine-threonine kinase (BTAK) gene, partial cds. |
| 131 | 009476CB1 | 2017386 | g3243035 | 0 | RuvB-like protein RUVBLI [Homo sapiens] |
| 132 | 1560874CB1 | 3815942 | g3283045 | 0 | CDC45L [Homo sapiens] |
| 133 | 3571894CB1 | 2132715 | g3288916 | 0 | aortic carboxypeptidase-like protein ACLP [Homo sapiens] |
| 134 | 349622.1 | 2055903 | g338422 | 0 | Human small proline rich protein (sprII) mRNA, clone 930. |
| 135 | 002940CB1 | 1679482 | g3402293 | 0 | aurora and IPL1-like midbody-associated protein kinase-1 [Homo sapiens] |
| 136 | 1362466CB1 | 1834502 | g34754 | 0 | put. ribosomal protein L3 (AA 1 - 348) [Homo sapiens] |
| 137 | 383376.19 | 4461157 | g37947 | 0 | VWF pre-pro-polypeptide (−22 to 2791) [Homo sapiens] |
| 138 | 1382961.3 | 3184882 | g386848 | 0 | keratin [Homo sapiens] |
| 139 | 1382961.15 | 4382348 | g3868804 | 0 | cytokeratin 17 [Mus musculus] |
| 140 | 1454852CB1 | 793403 | g38688040 | 0 | cytokeratin 17 [Mus musculus] |
| 141 | 2161632CB1 | 954057 | g39167330 | 0 | lysyl oxidase homolog [Perca flavescens] |
| 142 | 2058013CB1 | 1968413 | g401763 | 0 | ataxia-telangiectasia group D-associated protein [Homo sapiens] |
| 143 | 235333.1 | 1684632 | g402197 | 0 | ALK-1 [Homo sapiens] |
| 144 | 702628CB1 | 2418629 | g4049492 | 0 | Cdc6-related protein [Mus musculus] |
| 145 | 1383415.3 | 1420380 | g4098297 | 0 | Koc1 [Homo sapiens] |
| 146 | 236309.1 | 2925376 | g4102034 | 0 | Homo sapiens LNCaP mRNA, putative 3′UTR sequence. |
| 147 | 344868.13 | 3333118 | g4105617 | 0 | cytosolic NADP-dependent isocitrate dehydrogenase [Microtus ochrogaster] |
| 148 | 368869.1 | 5100602 | g4138921 | 0 | Homo sapiens promyclocytic leukemia zinc |
| | | | | | finger protein (PLZF) gene, complete cds. |
| 149 | 3256566CB1 | 1666069 | g4204915 | 0 | ladinin [Homo sapiens] |
| 150 | 4104673CB1 | 4104673 | g4261713 | 0 | chlordecone reductase homolog [Homo sapiens] |
| 151 | 345511.2 | 4243318 | g433491 | 0 | H. sapiens HLA-E gene. |
| 152 | 1723834CB1 | 1723834 | g4347S3 | 0 | KIAA0030 [Homo sapiens] |
| 153 | 078756CB1 | 490795 | g435776 | 0 | retinoblastoma binding protein 1, RBP1 [Homo sapiens] |
| 154 | 331749.3 | 1628341 | g453368 | 0 | Human maspin mRNA, complete cds. |
| 155 | 350528.7 | 1429293 | g456353 | 0 | intestinal VIP receptor related protein [[Homo sapiens] |
| 156 | 1099159.1 | 1519404 | g4755084 | 0 | Homo sapiens pro alpha 1(I) collagen (COL1A1) gene, |
| | | | | | complete cds. |
| 157 | 1530186CB1 | 3715059 | g4826465 | 0 | dJ287G14.2 (PUTATIVE novel seven transmembrane domain |
| | | | | | protein) [Homo sapiens] |
| 158 | 1092387.11 | 2674527 | g4871330 | 0 | Human hepatic dihydrodiol dehydrogenase gene, exon 9. |
| 159 | 107939.2 | 2313581 | g4902678 | 0 | hypothetical protein [Homo sapiens] |
| 160 | 899248.6 | 1832584 | g4929268 | 0 | LOMP protein [Homo sapiens] |
| 161 | 2959521CB1 | 87727 | g505102 | 0 | KIAA0062 [Homo sapiens] |
| 162 | 3331519CB1 | 2197965 | g512414 | 0 | tie receptor tyrosine kinase [Homo sapiens] |
| 163 | 1453334CB1 | 1445547 | g512447 | 0 | uPA [Homo sapiens] |
| 164 | 2798854CB1 | 4385292 | g5262584 | 0 | hypothetical protein [Homo sapiens] |
| 165 | 227961.1 | 2742979 | g5262S97 | 0 | hypothetical protein [Homo sapiens] |
| 166 | 1427470CB1 | 1430862 | g537514 | 0 | arylacetaniide deacetylase [Homo sapiens] |
| 167 | 206250.6 | 2180220 | g5457171 | 0 | dA159A1.1 (novel protein) [Homo sapiens] |
| 168 | 995068.15 | 893230 | g546085 | 0 | cytoplasmic antiproteinase, CAP = 38 kda intracellular |
| | | | | | serine proteinase inhibitor [Homo sapiens] |
| 169 | 2545475CB1 | 1981569 | g561722 | 0 | monocarboxylate transporter 1 [Homo sapiens] |
| 170 | 1502559CB1 | 1502559 | g5678815 | 0 | inositol polyphosphate 1-phosphatase [Homo sapiens] |
| 171 | 2239738CB1 | 2239738 | g5809682 | 0 | carboxypeptidase M precursor [Homo sapiens] |
| 172 | 347572.1 | 1501621 | g5817160 | 0 | hypothetical protein [Homo sapiens] |
| 173 | 977985.10 | 1445387 | g5912203 | 0 | Homo sapiens mRNA; cDNA DKFZp564N1164 (from |
| | | | | | clone DKFZp564N1164). |
| 174 | 236582.2 | 2720359 | g5926698 | 0 | Homo sapiens genomic DNA, chromosome 6p21.3, HLA Class I region, |
| | | | | | section 10/20. |
| 175 | 403676.1 | 1656490 | g5926709 | 0 | Homo sapiens genomic DNA, chromosome 6p21.3, HLA Class I region, |
| | | | | | section 19/20. |
| 176 | 138472CB1 | 2373085 | g598143 | 0 | alcohol dehydrogenase beta-3 subunit [Homo sapiens] |
| 177 | 253672.11 | 2851539 | g6016837 | 0 | Homo sapiens mRNA for 14-3-3gamma, complete cds. |
| 178 | 201928.3 | 2126712 | g6172223 | 0 | alias: DIL-2; chromosome 20 open reading frame 2 [Homo sapiens] |
| 179 | 198643.1 | 2187262 | g6273492 | 0 | Homo sapiens Spast gene for spastin protein. |
| 180 | 979448.2 | 1497012 | g6331294 | 0 | KIAA 1275 protein [Homo sapiens] |
| 181 | 460745.7 | 1381145 | g6331308 | 0 | KIAA 1277 protein [Homo sapiens] |
| 182 | 399300.18 | 2842978 | g6403463 | 0 | alpha-catulin [Homo sapiens] |
| 183 | 248091.1 | 1607083 | g6467177 | 0 | novel member of chitinase family [Homo sapiens] |
| 184 | 4030737CB1 | 2440848 | g6518913 | 0 | Bit [Homo sapiens] |
| 185 | 3012575CB1 | 3012575 | g6531404 | 0 | mutant desmin [Homo sapiens] |
| 186 | 221827.1 | 2057406 | g6599073 | 0 | caveolin-1/-2 locus, Contig1, D7S522 [Homo sapiens] |
| 187 | 238660.5 | 1604437 | g6624920 | 0 | DMBT1 prototype [Homo sapiens] |
| 188 | 2171401CB1 | 2055814 | g6642925 | 0 | ERO1L [Mus musculus] |
| 189 | 1420940CB1 | 1603408 | g6642929 | 0 | 3′phosphoadenosine 5′-phosphosulfate synthase 2b isoform [Homo sapiens] |
| 190 | 1383160.14 | 1834906 | g6807690 | 0 | hypothetical protein [Homo sapiens] |
| 191 | 233331.8 | 2154725 | g6808077 | 0 | hypothetical protein [Homo sapiens] |
| 192 | 338217.10 | 1989545 | g6808502 | 0 | C11orf9 [Homo sapiens] |
| 193 | 5982278CB1 | 2640427 | g683536 | 0 | CHO1 antigen [Cricetulus griseus] |
| 194 | 1097030.1 | 1760232 | g688384 | 0 | Differentiation-stimulating factor receptor, |
| | | | | | leukemia inhibitory factor receptor, LIF receptor [Mus sp.] |
| 195 | 1100509.4 | 2215183 | g6906729 | 0 | Cas and HEF1 associated signal transducer [Mus musculus] |
| 196 | 199671.1 | 1694119 | g7018527 | 0 | Homo sapiens mRNA; cDNA DKFZp762M127 (from clone DKFZp762M127). |
| 197 | 232137.20 | 2053221 | g7020309 | 0 | unnamed protein product [Homo sapiens] |
| 198 | 898608.2 | 3112520 | g7020365 | 0 | unnamed protein product [Homo sapiens] |
| 199 | 411373.3 | 1625856 | g7243117 | 0 | KIAA1368 protein [Homo sapiens] |
| 200 | 1092387.17 | 2070554 | g7328944 | 0 | 20 alpha-hydroxysteroid dehydrogenase [Homo sapiens] |
| 201 | 201906.5 | 3733666 | g7416858 | 0 | MBIP [Homo sapiens] |
| 202 | 3607580CB1 | 3607580 | g747970 | 0 | angiotensin II type 2 receptor [Homo sapiens] |
| 203 | 991163CB1 | 1809178 | g7578919 | 0 | plasmic transmembrane protein X [Mus musculus] |
| 204 | 1309633.1 | 1880421 | g7717462 | 0 | AgX-1 antigen [Homo sapiens] |
| 205 | 1384719.29 | 4372330 | g780261 | 0 | lactate dehydrogenase-A [Homo sapiens] |
| 206 | 178250.2 | 3075015 | g8216989 | 0 | putative cell cycle control protein [Homo sapiens] |
| 207 | 1099945.13 | 1911742 | g833853 | 0 | versican V2 core protein precursor [Homo sapiens] |
| 208 | 2172334CB1 | 2172334 | g840817 | 0 | gp130 [Mus musculus] |
| 209 | 253946.17 | 3625189 | g840817 | 0 | gp130 [Mus musculus] |
| 210 | 008513.49 | 2057510 | g908790 | 0 | keratin type II [Homo sapiens] |
| 211 | 1092257.2 | 1447795 | g912488 | 0 | gut-enriched Kruppel-like factor [Mus musculus] |
| 211 | 1092257.2 | 1962235 | g912488 | 0 | gut-enriched Kruppel-like factor [Mus musculus] |
| 211 | 1092257.2 | 3440567 | g912488 | 0 | gut-enriched Kruppel-like factor [Mus musculus] |
| 212 | 4349106CB1 | 2820861 | g912488 | 0 | gut-enriched Kruppel-like factor [Mus musculus] |
| 213 | 1814803CB1 | 1698951 | g1296503 | 1.00E−179 | uracil-DNA-glycosylase, UNG1 [Homo sapiens] |
| 214 | 1141764.8 | 1926114 | g7243185 | 1.00E−179 | KIAA1402 protein [Homo sapiens] |
| 215 | 406531.1 | 1603580 | g339560 | 1.00E−178 | bone morphogenetic protein 5 [Homo sapiens] |
| 216 | 429307.4 | 3144021 | g4321794 | 1.00E−177 | Homo sapiens keratin 16 (KRT16A) gene, complete cds. |
| 217 | 239515.9 | 1675369 | g4151205 | 1.00E−176 | neurogenic extracellular slit protein Slit2 [Homo sapiens] |
| 218 | 1089210.1 | 5033671 | g4261710 | 1.00E−176 | chlordecone reductase [Homo sapiens] |
| 219 | 010796.18 | 1445895 | g2467300 | 1.00E−173 | phosphatidic acid phosphatase 2b [Homo sapiens] |
| 220 | 3752346CB1 | 1378037 | g3334761 | 1.00E−173 | ribonuclease HI large subunit [Homo sapiens] |
| 221 | 2729828CB1 | 1858171 | g34033 | 1.00E−173 | keratin 13 [Homo sapiens] |
| 222 | 1648579CB1 | 3142624 | g187291 | 1.00E−172 | MAD3 [Homo sapiens] |
| 223 | 1454418CB1 | 1468660 | g29839 | 1.00E−172 | CDC2 polypeptide (CDC2) (AA 1-297) [Homo sapiens] |
| 224 | 995529.10 | 2957476 | g29839 | 1.00E−172 | CDC2 polypeptide (CDC2) (AA 1-297) [Homo sapiens] |
| 225 | 2126751CB1 | 2126751 | g1923256 | 1.00E−167 | 26S proteasome-associated pad1 homolog [Homo sapiens] |
| 226 | 569648CB1 | 2720467 | g5231092 | 1.00E−163 | macrophage receptor [Homo sapiens] |
| 227 | 1352789CB1 | 3000146 | g7023570 | 1.00E−163 | unnamed protein product [Homo sapiens] |
| 228 | 1635966CB1 | 2046165 | g6318544 | 1.00E−162 | retinal short-chain dehydrogenase/reductase retSDR2 [Homo sapiens] |
| 229 | 349415.6 | 3074415 | g1125016 | 1.00E−159 | MAGE−6 protein [Homo sapiens] |
| 230 | 406438.14 | 2797787 | g1552328 | 1.00E−158 | TFG [Homo sapiens] |
| 231 | 1471808CB1 | 3074415 | g533523 | 1.00E−158 | MAGE−6 antigen [Homo sapiens] |
| 232 | 245595.1 | 2052480 | g7328092 | 1.00E−158 | hypothetical protein [Homo sapiens] |
| 233 | 2784232CB1 | 3151158 | g7023868 | 1.00E−157 | unnamed protein product [Homo sapiens] |
| 234 | 2742913CB1 | 2516950 | g179795 | 1.00E−156 | carbonic anhydrase II [Homo sapiens] |
| 235 | 1509972CB1 | 4047785 | g338327 | 1.00E−156 | pulmonary surfactant-associated protein SP-B [Homo sapiens] |
| 236 | 1097638.1 | 1903760 | g187094 | 1.00E−155 | Human low density lipoprotein receptor gene, exon 18. |
| 237 | 900035.58 | 1900306 | g1418928 | 1.00E−154 | prepro-alpha1(I) collagen [Homo sapiens] |
| 237 | 900035.58 | 5186773 | g1418928 | 1.00E−154 | prepro-alpha1(I) collagen [Homo sapiens] |
| 238 | 1075592.6 | 1423848 | g505589 | 1.00E−154 | [Human insulin-like growth factor binding protein 5 |
| | | | | | (IGFBP5) gene], gene product [Homo sapiens] |
| 239 | 984540.1 | 1393337 | g7657926 | 1.00E−154 | UDP-N-acetyl-alpha-D-galactosamine: polypeptide |
| | | | | | N-acetylgalactosaminyltransferase 8 [Homo sapiens] |
| 240 | 378633.40 | 1821938 | g1182067 | 1.00E−153 | tryptase precursor [Homo sapiens] |
| 241 | 477387.7 | 3100048 | g469478 | 1.00E−152 | SM-20 [Rattus norvegicus] |
| 242 | 347049.9 | 2057158 | g1161562 | 1.00E−151 | stomatin [Homo sapiens] |
| 243 | 1097717.18 | 5065213 | g1732423 | 1.00E−151 | C9 [Homo sapiens] |
| 244 | 2832214CB1 | 2832214 | g1732423 | 1.00E−151 | C9 [Homo sapiens] |
| 245 | 2947513CB1 | 5984038 | g1732423 | 1.00E−151 | C9 [Homo sapiens] |
| 246 | 1655369CB1 | 2056840 | g3319988 | 1.00E−151 | TOM1 [Mus musculus] |
| 247 | 039170.3 | 2418484 | g1029482 | 1.00E−150 | H. sapiens CpG island DNA genomic Mse1 fragment, |
| | | | | | clone 33e12, reverse read cpg33e12rt1f. |
| 248 | 1074926.1 | 2947513 | g176959 | 1.00E−150 | P. troglodytes triose-phosphate isomerase (TPI) gene, complete cds. |
| 249 | 344297.5 | 62144 | g413911 | 1.00E−149 | Rat cyclin E [Rattus rattus] |
| 250 | 410721.1 | 4688 | g416115 | 1.00E−149 | MAGE−1 [Homo sapiens] |
| 251 | 1121097.1 | 1450641 | g7023561 | 1.00E−147 | unnamed protein product [Homo sapiens] |
| 252 | 1097450.22 | 3374194 | g307042 | 1.00E−145 | gamma-interferon-inducible protein precursor [Homo sapiens] |
| 253 | 238533.1 | 2790947 | g7673566 | 1.00E−144 | CLIC5 [Homo sapiens] |
| 254 | 1097080.8 | 2694381 | g2674195 | 1.00E−143 | polymerase I-transcript release factor; PTRF [Mus musculus] |
| 255 | 1097450.20 | 3374194 | g307042 | 1.00E−142 | gamma-interferon-inducible protein precursor [Homo sapiens] |
| 256 | 2514988CB1 | 1886886 | g178853 | 1.00E−141 | apolipoprotein E [Homo sapiens] |
| 257 | 3130485CB1 | 1987238 | g3885376 | 1.00E−140 | Homo sapiens mRNA expressed only in placental villi, clone SMAP31. |
| 258 | 1330234.11 | 5392723 | g189151 | 1.00E−138 | nephropontin [Homo sapiens] |
| 259 | 1943624CB1 | 1943624 | g439603 | 1.00E−137 | Rad [Homo sapiens] |
| 260 | 2189816CB1 | 2189816 | g478887 | 1.00E−137 | folate receptor 3 (gamma) [Homo sapiens] |
| 261 | 039027.1 | 3861522 | g5689824 | 1.00E−137 | Homo sapiens mnRNA full length insert cDNA clone EUROIMAGE 295344 |
| 262 | 2502336CB1 | 2507719 | g533528 | 1.00E−136 | MAGE−9 antigen [Homo sapiens] |
| 263 | 3592543CB1 | 5066393 | g386839 | 1.00E−135 | JUN [Homo sapiens] |
| 264 | 399589.1 | 2070856 | g7688215 | 1.00E−135 | dJ788L20.1 (hepatocyte nuclear factor 3, beta) [Homo sapiens] |
| 265 | 2175401CB1 | 1833174 | g4262298 | 1.00E−132 | integral membrane protein 2A [Mus musculus] |
| 266 | 084455.9 | 1356268 | g3329482 | 1.00E−131 | Sox-like transcriptional factor [Homo sapiens] |
| 267 | 233041.5 | 2060622 | g36652 | 1.00E−128 | syndecan [Homo sapiens] |
| 268 | 1382961.5 | 3184882 | g386848 | 1.00E−128 | keratin [Homo sapiens] |
| 269 | 1518310CB1 | 1518310 | g4481753 | 1.00E−127 | connexin 26 [Homosapiens] |
| 270 | 1517817CB1 | 1402078 | g4894854 | 1.00E−127 | complement C1q A chain precursor [Homo sapiens] |
| 271 | 3090387CB1 | 1714684 | g7325554 | 1.00E−127 | tumor necrosis factor-related death ligand-1alpha [Homo sapien] |
| 272 | 3836893CB1 | 3836893 | g8050527 | 1.00E−125 | triggering receptor expressed on monocytes 1 [Homo sapiens] |
| 273 | 394121.2 | 2796118 | g3046817 | 1.00E−117 | glutathione-requiring prostaglandin D synthase [Homo sapiens] |
| 274 | 2347046CB1 | 2347046 | g443669 | 1.00E−117 | protein phosphatase [Homo sapiens] |
| 275 | 1137894.1 | 2059420 | g183445 | 1.00E−116 | zinc finger transcriptional regulator [Homo sapiens] |
| 276 | 1137536.4 | 1753015 | g2674061 | 1.00E−115 | Homo sapiens 3-phosphoglycerate dehydrogenase mRNA, complete cds. |
| 277 | 2501808CB1 | 2501808 | g7416120 | 1.00E−114 | ubiquitin-conjugating enzyme isolog [Homo sapiens] |
| 278 | 4767318CB1 | 3088261 | g7299015 | 1.00E−112 | CG9615 gene product [Drosophila melanogaster] |
| 279 | 1223705CB1 | 1633118 | g579930 | 1.00E−109 | glutathione peroxidase-GI [Homo sapiens] |
| 280 | 296696.7 | 851875 | g5725508 | 1.00E−108 | METH2 protein [Homo sapiens] |
| 281 | 410320.1 | 2886536 | g1033887 | 1.00E−107 | H. sapiens CpG island DNA genomic Mse1 fragment, |
| | | | | | clone 53d4, reverse read cpg53d4.rt1b. |
| 282 | 426109.1 | 2057823 | g181916 | 1.00E−107 | ubiquitin carrier protein [Homo sapiens] |
| 283 | 1098589.27 | 2152363 | g35068 | 1.00E−105 | Nm23 protein [Homo sapiens] |
| 284 | 233575.1 | 1222942 | g6177738 | 1.00E−104 | MCT-1 [Homo sapiens] |
| 285 | 235191.4 | 1997915 | g2062373 | 1.00E−101 | cyclin-selective ubiquitin carrier protein [Homo sapiens] |
| 286 | 468221.19 | 1662856 | g1469920 | 1.00E−100 | D53 [Homo sapiens] |
| 287 | 986342.1 | 2811372 | g4678526 | 5.00E−99 | dJ971N18.2 [Homo sapiens‘] |
| 288 | 240120.3 | 2795141 | g3094994 | 2.00E−95 | HBGF [Homo sapiens] |
| 289 | 5511889CB1 | 6105902 | g2612868 | 2.00E−94 | down syndrome candidate region 1; |
| | | | | | one of four alternatively spliced exon 1 [Homo sapiens] |
| 290 | 3009578CB1 | 3009578 | g1665817 | 4.00E−94 | Similar to S. cerevisiae hypothetical protein L3111 (S59316) [Homo sapiens[ |
| 291 | 982520.1 | 4821815 | g7573532 | 4.00E−93 | dJ136014.2 (collagen, type X, alpha 1) [Homo sapiens] |
| 292 | 899156.36 | 2851850 | g29904 | 3.00E−92 | cfos [Homo sapiens] |
| 293 | 1748428CB1 | 1658215 | g37481 | 3.00E−92 | TTG-2a/RBTN-2a [Homo sapiens] |
| 294 | 238540.1 | 1608244 | g5103021 | 3.00E−91 | Homo sapiens genomic DNA, chromosome 22q11.2, clone N110F4. |
| 295 | 898495.3 | 5261507 | g1575365 | 1.00E−90 | Human DSS1 pseudogene (DSS1P1), complete sequence. |
| 296 | 369213.48 | 1292449 | g579592 | 9.00E−90 | alpha 2-macroglobulin 690-730 [Homo sapiens] |
| 297 | 3084563CB1 | 5834427 | g181071 | 2.00E−89 | cysteine-rich protein [Homo sapiens] |
| 298 | 237613.7 | 1975550 | g7292879 | 2.00E−89 | CG1998 gene product [Drosophila melanogaster] |
| 299 | 2630652CB1 | 2152363 | g35068 | 2.00E−87 | Nm23 protein [Homo sapiens] |
| 300 | 5785224GB1 | 1212335 | g7300628 | 9.00E−87 | CG10877 gene product [Drosophila melanogaster] |
| 301 | 409911.8 | 2219364 | g2474096 | 2.00E−86 | XMP [Homo sapiens] |
| 302 | 2418523CB1 | 2454639 | g191983 | 4.00E−86 | clathrin-associated protein 19 [Mus musculus] |
| 303 | 1091297.30 | 2418490 | g189226 | 6.00E−86 | putative [Homo sapiens] |
| 304 | 369213.2 | 2200842 | g6048565 | 1.00E−85 | retinoid inducible gene 1 [Homo sapiens] |
| 305 | 221869.5 | 5523515 | g7243133 | 2.00E−82 | KIAA1376 protein [Homo sapiens] |
| 306 | 995529.6 | 2957476 | g29839 | 1.00E−81 | CDC2 polypeptide (CDC2) (AA 1-297) [Homo sapiens] |
| 307 | 982959.1 | 3115823 | g4028581 | 1.00E−81 | connective tissue growth factor related protein WISP-1 [Homo sapiens] |
| 308 | 342074.1 | 4408943 | g5732680 | 1.00E−81 | amino acid transporter B0+ [Homo sapiens] |
| 309 | 245194.2 | 1512826 | g2920504 | 2.00E−81 | frpHE [Homo sapiens] |
| 310 | 246444.6 | 3382391 | g6688153 | 1.00E−78 | small proline-rich protein 3 [Homo sapiens] |
| 311 | 374054.4 | 3843227 | g7301679 | 3.00E−78 | CG1540 gene product [Drosophila melanogaster] |
| 312 | 001322.4 | 2663164 | g7243009 | 1.00E−77 | KIAA1314 protein [Homo sapiens] |
| 313 | 406438.12 | 2797787 | g1552327 | 5.00E−76 | H. sapiens mRNA for TFG protein. |
| 314 | 1382961.12 | 4382348 | g34075 | 1.00E−75 | keratin related product [Homo sapiens] |
| 315 | 1359783CB1 | 3138721 | g458228 | 5.00E−75 | extracellular protein [Homo sapiens] |
| 316 | 1796035CB1 | 3986547 | g641937 | 1.00E−74 | ribonuclease A precursor [Homo sapiens] |
| 317 | 444850.11 | 2860704 | g7023332 | 4.00E−73 | unnamed protein product [Homo sapiens] |
| 318 | 236062CB1 | 2238411 | g6434876 | 4.00E−72 | CDK4-binding protein p345EI1 [Homo sapiens] |
| 319 | 333238.12 | 2833637 | g7021853 | 5.00E−72 | unnamed protein product [Homo sapiens] |
| 320 | 475547.2 | 1955363 | g7023806 | 2.00E−71 | unnamed protein product [Homo sapiens] |
| 321 | 977929.1 | 4112181 | g6690339 | 3.00E−71 | hematopoietic zinc finger protein [Mus musculus] |
| 322 | 1362715CB1 | 1816113 | g6457338 | 1.00E−69 | E2IG1 [Homo sapiens] |
| 323 | 3117642CB1 | 3117642 | g3300092 | 4.00E−69 | prostate associated PAGE−1 [Homo sapiens] |
| 324 | 2026270CB1 | 2026270 | g190726 | 9.00E−68 | parathyroid hormone-related protein precursor [Homo sapiens] |
| 325 | 981662.2 | 4401727 | g7022306 | 3.00E−67 | unnamed protein product [Homo sapiens] |
| 326 | 453004.10 | 2394888 | g4704752 | 6.00E−67 | calpain 3; calcium activated neutral protease; CAPN3; CL1 [Homo sapiens] |
| 327 | 978147.7 | 2784394 | g7022973 | 5.00E−66 | unnamed protein product [Homo sapiens] |
| 328 | 2132626CB1 | 541875 | g3171914 | 6.00E−66 | RAMP3 [Homo sapiens] |
| 329 | 402716.37 | 4199466 | g3582143 | 1.00E−65 | DNA-binding zinc finger(GBF) [Homo sapiens] |
| 330 | 464482.1 | 625374 | g181227 | 3.00E−65 | cytochrome b5 [Homo sapiens] |
| 331 | 402716.20 | 4199466 | g2745961 | 1.00E−64 | Bcd orf2 [Homo sapiens] |
| 332 | 1137710.5 | 1713191 | g471126 | 4.00E−64 | Id-2H [Homo sapiens] |
| 333 | 348912.3 | 1716655 | g219936 | 2.00E−62 | NCA-W272 [Homo sapiens] |
| 334 | 474926.11 | 2512203 | g312334 | 1.00E−61 | macrophage migration inhibitory factor [Homo sapiens] |
| 335 | 406804.4 | 3130454 | g6331328 | 1.00E−61 | KIAA1280 protein [Homo sapiens] |
| 336 | 480855.1 | 3234063 | g6808254 | 1.00E−60 | hypothetical protein [Homo sapiens] |
| 337 | 238593.5 | 211779 | g7106770 | 3.00E−60 | HSPC190 [Homo sapiens] |
| 338 | 373514.7 | 4740251 | g8515711 | 3.00E−60 | EXP35 [Homo sapiens] |
| 339 | 1383354.10 | 5057204 | g6983729 | 4.00E−60 | dJ977B1.5 (myosin regulatory light chain 2, |
| | | | | | smooth muscle isoform) [Homo sapiens] |
| 340 | 3120070CB1 | 3120070 | g7582391 | 4.00E−57 | p53 apoptosis-associated target [Mus musculus] |
| 341 | 253987.19 | 2232658 | g395338 | 2.00E−55 | helix-loop-helix protein [Homo sapiens] |
| 342 | 133425.16 | 3510656 | g178349 | 2.00E−54 | fructose 1,6-bisphosphatase (EC 3.1.3.11) [Homo sapiens] |
| 343 | 468221.18 | 1662856 | g1469920 | 5.00E−54 | D53 [Homo sapiens] |
| 344 | 020093.8 | 2102756 | g573114 | 6.00E−54 | Clq B-chain precursor [Homo sapiens] |
| 345 | 1556751CB1 | 1986121 | g7959303 | 1.00E−52 | KIAA1518 protein [Homo sapiens] |
| 346 | 1397976.1 | 4628258 | g306799 | 2.00E−52 | pregnancy-specific beta-glycoprotein e [Homo sapiens] |
| 347 | 233828.16 | 1362831 | g7021111 | 2.00E−52 | unnamed protein Product [Homo sapiens] |
| 348 | 1253414CB1 | 5681633 | g450281 | 6.00E−52 | isolog of yeast sui1 and rice gos2; putative [Homo sapiens] |
| 349 | 1101068.1 | 5856402 | g6164743 | 4.00E−51 | F-box protein Fbx20 [Homo sapiens] |
| 350 | 006922.1 | 2934515 | g7242957 | 4.00E−49 | KIAA 1301 protein [Homo sapiens] |
| 351 | 333398.5 | 2456903 | g6502523 | 2.00E−48 | Smad6 protein [Homo sapiens] |
| 352 | 235725.21 | 2095728 | g2407068 | 3.00E−48 | TFAR19 [Homo sapiens] |
| 353 | 242472.14 | 4572916 | g34416 | 1.00E−47 | precursor (AA −19 to 692) [Homo sapiens] |
| 354 | 253550.20 | 3397390 | g183116 | 3.00E−46 | insulin-like growth factor-binding protein [Homo sapiens] |
| 355 | 216262.3 | 3813934 | g4128051 | 5.00E−46 | EBI1-31 ligand chemokine [Homo sapiens] |
| 356 | 235191.3 | 1997915 | g6706799 | 5.00E−46 | dJ447F3.2 (ubiquitin-conjugating enzyme E2 H10) [Homo sapiens] |
| 357 | 480337.45 | 4602215 | g1167 | 4.00E−45 | cpn10 protein [Bos taurus] |
| 358 | 199939.6 | 1858415 | g2232019 | 8.00E−44 | HPV16 E1 protein binding protein [Homo sapiens] |
| 359 | 201204.9 | 4088394 | g4323528 | 1.00E−43 | cell cycle protein CDC20 [Homo sapiens] |
| 360 | 201887.2 | 3478024 | g2988398 | 2.00E−43 | Unknown gene product [Homo sapiens] |
| 361 | 1136056.1 | 3527982 | g1082038 | 3.00E−43 | G053 is human homolog of mouse FOSB gene [Homo sapiens] |
| 362 | 994977.1 | 3722056 | g30102 | 4.00E−43 | type I collagen [Homo sapiens] |
| 363 | 888669.8 | 4721466 | g7329217 | 6.00E−42 | TS58 [Homo sapiens] |
| 364 | 345860.20 | 5160686 | g29710 | 9.00E−42 | preprocathepsin H (AA −22 to 314) [Homo sapiens] |
| 365 | 480337.43 | 1459082 | g6996446 | 2.00E−39 | chaperonin 10, Hsp10 protein [Homo sapiens] |
| 365 | 480337.43 | 4602215 | g6996446 | 2.00E−39 | chaperonin 10, Hsp10 protein [Homo sapiens] |
| 366 | 399300.14 | 2842978 | g3818590 | 2.00E−38 | alpha-catenin-like protein; CG-4 [Homo sapiens] |
| 367 | 368015.2 | 3115792 | g7717449 | 3.00E−38 | Homo sapiens chromosome 21 segment HS21C103. |
| 368 | 227550.1 | 3771020 | g4028563 | 7.00E−38 | brain and nasopharyngeal carcinoma susceptibility protein |
| | | | | | NSG-x [Homo sapiens] |
| 369 | 201906.6 | 3733666 | g7416858 | 2.00E−36 | MBIP [Homo sapiens] |
| 370 | 349589.10 | 127321 | g2370126 | 6.00E−36 | LIM-31 domain protein [Homo sapiens] |
| 371 | 3713867CB1 | 2061401 | g28608 | 4.00E−35 | precursor polypeptide (AA −36 to 479) [Homo sapiens] |
| 372 | 235943.27 | 2957567 | g188870 | 1.00E−34 | polymorphic epithelial mucin [Homo sapiens] |
| 373 | 241742.1 | 1295905 | g190168 | 2.00E−34 | Homo sapiens dinucleotide repeat polymorphism, at locus D5S178 |
| 374 | 333680.1 | 3138456 | g7295285 | 4.00E−34 | melt gene product [Drosophila melanogaster] |
| 375 | 411429.3 | 1424886 | g4929719 | 9.00E−34 | CGI-125 protein [Homo sapiens] |
| 376 | 2356055CB1 | 2356055 | g6580815 | 9.00E−34 | indolethylamine N-methyltransferase [Homo sapiens] |
| 377 | 239579.3 | 1704713 | g3462455 | 2.00E−33 | junctional adhesion molecule [Mus musculus] |
| 378 | 332240.1 | 2201507 | g7022637 | 3.00E−32 | unnamed protein product [Homo sapiens] |
| 379 | 255161.1 | 2270986 | g7107421 | 3.00E−32 | ferritin light chain [Cavia porcellus] |
| 380 | 2454384CB1 | 2454384 | g1293145 | 2.00E−31 | rhotekin [Mus musculus] |
| 381 | 1383298.3 | 1510539 | g1711117 | 6.00E−31 | ligand activated transcription factor PPARgamma2 [Homo sapiens] |
| 382 | 383376.7 | 5551761 | g340361 | 1.00E−30 | von Willebrand factor prepropeptide [Homo sapiens] |
| 383 | 230816.1 | 1526322 | g7340847 | 2.00E−29 | chondroItin 4-sulfotransferase [Mus musculus] |
| 384 | 211949.2 | 1966295 | g5817053 | 3.00E−29 | hypothetical protein [Homo sapiens] |
| 385 | 238853.42 | 1450886 | g386803 | 2.00E−28 | 40-kDa keratin protein [Homo sapiens] |
| 386 | 333165.2 | 1682337 | g7020625 | 6.00E−28 | unnamed protein product [Homo sapiens] |
| 387 | 344868.12 | 3333118 | g4761222 | 1.00E−27 | Homo sapiens NADP+-dependent isocitrate |
| | | | | | dehydrogenase (PICD) mRNA, complete cds. |
| 388 | 148304.14 | 3646303 | g8131858 | 1.00E−27 | putative thymic stromal co-transporter TSCOT [Mus musculus] |
| 389 | 247747.6 | 3124204 | g4377993 | 6.00E−27 | tumor transforming protein 1 [Homo sapiens] |
| 390 | 001153.12 | 5546984 | g505033 | 4.00E−26 | mitogen inducible gene mig-2 [Homo sapiens] |
| 391 | 1095728.19 | 414480 | g7209525 | 1.00E−25 | DRAL/Slim3/FHL2 [Homo sapiens] |
| 392 | 222604.7 | 2745735 | g7293742 | 4.00E−25 | CG15881 gene product [Drosophila melanogaster] |
| 393 | 1094984.14 | 2620487 | g6330840 | 9.00E−25 | KIAA1247 protein [Homo sapiens] |
| 394 | 400702.1 | 1969974 | g7770167 | 9.00E−25 | PRO2176 [Homo sapiens] |
| 395 | 196557.1 | 1927026 | g2570154 | 3.00E−24 | 17-kDa PKC-potentiated inhibitory protein of PP1 [Sus scrofa] |
| 396 | 237208.5 | 993365 | g8037909 | 6.00E−24 | PAR6A [Mus musculus] |
| 397 | 337792.2 | 1832594 | g219476 | 1.00E−23 | APR peptide [Homo sapiens] |
| 398 | 398970.3 | 4885619 | g387015 | 1.00E−23 | pepsinogen C [Homo sapiens] |
| 399 | 1309633.3 | 1880421 | g7717462 | 9.00E−23 | AgX-1 antigen [Homo sapiens] |
| 400 | 981662.1 | 4401727 | g7022306 | 4.00E−21 | unnamed protein product [Homo sapiens] |
| 401 | 081187.1 | 2416447 | g219928 | 9.00E−21 | Human midkine gene, complete cds. |
| 402 | 086533.6 | 219839 | g533381 | 1.00E−19 | homologous to members of the I-kappa B family; |
| | | | | | protein binds NF-kappa B proteins [Homo sapiens] |
| 403 | 1093481.2 | 1962139 | g1814277 | 2.00E−19 | A33 antigen precursor [Homo sapiens] |
| 404 | 024494.7 | 1938744 | g6970439 | 2.00E−19 | CLST 11240 protein [Homo sapiens] |
| 405 | 888669.7 | 4721466 | g337451 | 3.00E−19 | hnRNP type A/B protein [Homo sapiens] |
| 406 | 428206.1 | 2675284 | g7291878 | 3.00E−19 | CG2811 gene product [Drosophila melanogaster] |
| 407 | 1328026.7 | 549728 | g3065741 | 4.00E−18 | small proline-rich protein 1A [Mus musculus] |
| 408 | 475113.7 | 1700462 | g7270660 | 5.00E−18 | putative protein [Arabidopsis thaliana] |
| 409 | 204392.5 | 2950394 | g510339 | 6.00E−18 | phosphatidylethanolamine-binding protein [Rattus norvegicus] |
| 410 | 1092257.12 | 3440567 | g1857161 | 2.00E−17 | hEZF [Homo sapiens] |
| 411 | 1134990.3 | 3878116 | g4894950 | 7.00E−17 | encephalopsin [Mus musculus] |
| 412 | 1095223.13 | 4158982 | g1478205 | 1.00E−16 | PNG protein [Mus musculus] |
| 413 | 214654.1 | 1681727 | g7020625 | 4.00E−16 | unnamed protein product [Homo sapiens] |
| 414 | 086533.5 | 219839 | g179376 | 7.00E−16 | lymphoma 3-encoded protein (bcl-3) [Homo sapiens] |
| 415 | 474117.5 | 3992320 | g1620561 | 2.00E−15 | C-1 [Homo sapiens] |
| 416 | 410812.1 | 3380665 | g7768737 | 2.00E−15 | Homo sapiens genomic DNA, chromosome 21q, section 89/105. |
| 417 | 011822.2 | 2887646 | g2239242 | 5.00E−15 | kinesin-like protein [Schizosaccharomyces pombe] |
| 418 | 252899.7 | 2811710 | g7959267 | 2.00E−14 | KIAA1503 protein [Homo sapiens] |
| 419 | 1511488CB1 | 1511488 | g6457344 | 3.00E−14 | E2IG5 [Homo sapiens] |
| 420 | 1383797.1 | 1466844 | g2088550 | 5.00E−14 | hereditary haemochromatosis region [Homo sapiens] |
| 421 | 400745.1 | 4205017 | g7688148 | 3.00E−13 | hypothetical protein [Homo sapiens] |
| 422 | 029618.1 | 1223877 | g4678684 | 7.00E−13 | hypothetical protein [Schizosaccharomyces pombe] |
| 423 | 245722.8 | 2508079 | g1694828 | 1.00E−12 | S100 calcium-binding protein A13 (S100A13) [Homo sapiens] |
| 424 | 981488.1 | 2159213 | g7020292 | 1.00E−12 | unnamed protein product [Homo sapiens] |
| 424 | 981488.1 | 2449016 | g7020292 | 1.00E−12 | unnamed protein product [Homo sapiens] |
| 425 | 241858.1 | 4460483 | g7768730 | 1.00E−12 | Homo sapiens genomic DNA, chromosome 21q, section 73/105. |
| 426 | 1466276CB1 | 739191 | g63466 | 5.00E−12 | histone H2A [Gallus gallus] |
| 427 | 999386.3 | 5286390 | g7295892 | 8.00E−11 | CG3104 gene product [Drosophila melanogaster] |
| 428 | 1091079.8 | 1503624 | g1946351 | 1.00E−10 | cell surface protein HCAR [Homo sapiens] |
| 429 | 407084.1 | 3423374 | g177869 | 4.00E−10 | Human alpha-2-macroglobulin mRNA, complete cds. |
| 430 | 215642.2 | 1923709 | g6331286 | 5.00E−10 | Homo sapiens mRNA for KIAA1274 protein, |
| | | | | | partial cds. |
| 431 | 1159769.1 | 3929017 | g6630766 | 6.00E−10 | dJ300I2.1 (secretory leukocyte protease inhibitor |
| | | | | | (antileukoproteinase)) [Homo sapiens] |
| 432 | 482336.31 | 4104390 | g1200072 | 2.00E−09 | keratin [Homo sapiens] |
| 433 | 064703.1 | 1900111 | g5712737 | 6.00E−09 | Homo sapiens alpha-1-antitrypsin nuclear matrix attachment region sequence. |
| 434 | 294837.1 | 3255489 | g1054740 | 1.00E−08 | chromosomal region [Homo sapiens] |
| 435 | 982699.1 | 5394922 | g1438107 | 1.00E−08 | Homo sapiens DNA for NRAMP1, partial cds. |
| 436 | 015126.1 | 4361169 | g5103017 | 1.00E−08 | Homo sapiens genomic DNA, chromosome 22q11.2, clone KB1674E1. |
| 437 | 235132.10 | 5682290 | g7573229 | 1.00E−08 | profilin II [Mus musculus] |
| 438 | 1070092.1 | 2965648 | g4927774 | 4.00E−08 | HHLA3 protein [Homo sapiens] |
| 439 | 272599.1 | 2278772 | g5926699 | 4.00E−08 | Homo sapiens genomic DNA, chromosome 6p21.3, |
| | | | | | HLA Class I region, section 11/20 |
| 440 | 415901.1 | 2998131 | g1203968 | 1.00E−07 | chromosome X region from filamin (FLN) gene to |
| | | | | | glucose-6-phosphate dehydrogenase (G6PD) gene [Homo sa |
| 441 | 477387.3 | 3100048 | g469478 | 2.00E−07 | SM-20 [Rattus norvegicus] |
| 442 | 208702.1 | 3658444 | g6969578 | 2.00E−07 | Homo sapiens glutaminase kidney isoform mRNA, complete cds. |
| 443 | 1135039.1 | 899118 | g7020625 | 4.00E−07 | unnamed protein product [Homo sapiens] |
| 444 | 232649.2 | 2234640 | g7768718 | 8.00E−07 | Homo sapiens genomic DNA, chromosome 21q, section 62/105. |
| 445 | 340450.1 | 4639995 | g558908 | 9.00E−07 | reverse transcriptase [Mus musculus] |
| 446 | 320660.1 | 5034026 | g7768679 | 9.00E−07 | Homo sapiens genomic DNA, chromosome 21q, section 64/105. |
| 447 | 467104.21 | 2054055 | g397606 | 2.00E−06 | H. sapiens encoding CLA-1 mRNA. |
| 448 | 332382.1 | 3999569 | g4240144 | 4.00E−06 | Homo sapiens mRNA for KIAA0828 protein, partial cds. |
| 449 | 2104530CB1 | 2104530 | g806564 | 1.00E−04 | Sm protein F [Homo sapiens] |
| 450 | 007228.1 | 60306 | | 0 | Incyte Unique |
| 451 | 008098.1 | 313312 | | 0 | Incyte Unique |
| 452 | 016124.2 | 3732960 | | 0 | Incyte Unique |
| 453 | 016149.1 | 3736058 | | 0 | Incyte Unique |
| 454 | 025731.1 | 2586554 | | 0 | Incyte Unique |
| 455 | 026856.1 | 1300730 | | 0 | Incyte Unique |
| 456 | 028918.1 | 2800380 | | 0 | Incyte Unique |
| 457 | 032481.1 | 4073339 | | 0 | Incyte Unique |
| 458 | 045630.1 | 1269876 | | 0 | Incyte Unique |
| 459 | 047533.1 | 4276910 | | 0 | Incyte Unique |
| 460 | 072540.1 | 2152929 | | 0 | Incyte Unique |
| 461 | 076580.1 | 2264967 | | 0 | Incyte Unique |
| 462 | 1072776.1 | 5505238 | | 0 | Incyte Unique |
| 463 | 1100233.1 | 3725970 | | 0 | Incyte Unique |
| 464 | 1102220.2 | 1299351 | | 0 | Incyte Unique |
| 465 | 1328508.1 | 2669974 | | 0 | Incyte Unique |
| 466 | 1383457.1 | 5024278 | | 0 | Incyte Unique |
| 467 | 140230.5 | 1211835 | | 0 | Incyte Unique |
| 468 | 150868.1 | 491129 | | 0 | Incyte Unique |
| 469 | 172582.1 | 5622463 | | 0 | Incyte Unique |
| 470 | 175536.1 | 122943 | | 0 | Incyte Unique |
| 470 | 175536.1 | 5187276 | | 0 | Incyte Unique |
| 471 | 176928.1 | 2782090 | | 0 | Incyte Unique |
| 472 | 197252.1 | 2656358 | | 0 | Incyte Unique |
| 473 | 1975480CB1 | 3852527 | | 0 | Incyte Unique |
| 474 | 200578.1 | 473724 | | 0 | Incyte Unique |
| 475 | 202117.4 | 1402988 | | 0 | Incyte Unique |
| 476 | 204750.3 | 2021485 | | 0 | Incyte Unique |
| 477 | 205232.1 | 1379153 | | 0 | Incyte Unique |
| 478 | 212157.1 | 3130003 | | 0 | Incyte Unique |
| 479 | 221846.4 | 4116336 | | 0 | Incyte Unique |
| 480 | 222092.1 | 2154847 | | 0 | Incyte Unique |
| 481 | 228350.1 | 2605849 | | 0 | Incyte Unique |
| 482 | 229170.1 | 1818484 | | 0 | Incyte Unique |
| 483 | 230820.1 | 3120378 | | 0 | Incyte Unique |
| 484 | 231160.1 | 1848676 | | 0 | Incyte Unique |
| 485 | 232212.1 | 1866738 | | 0 | Incyte Unique |
| 486 | 234090.1 | 1718918 | | 0 | Incyte Unique |
| 487 | 236432.1 | 3322032 | | 0 | Incyte Unique |
| 488 | 236497.1 | 1682609 | | 0 | Incyte Unique |
| 489 | 237208.4 | 993365 | | 0 | Incyte Unique |
| 490 | 2484813CB1 | 1338090 | | 0 | Incyte Unique |
| 491 | 249104.1 | 2394947 | | 0 | Incyte Unique |
| 492 | 287241.1 | 3412108 | | 0 | Incyte Unique |
| 493 | 316571.1 | 5185101 | | 0 | Incyte Unique |
| 494 | 331447.1 | 3363538 | | 0 | Incyte Unique |
| 495 | 333127.1 | 153430 | | 0 | Ineyte Unique |
| 496 | 334025.5 | 3724351 | | 0 | Incyte Unique |
| 497 | 334570.1 | 1296146 | | 0 | Incyte Unique |
| 498 | 334814.1 | 1645745 | | 0 | Incyte Unique |
| 499 | 335692.1 | 5023108 | | 0 | Incyte Unique |
| 500 | 337407.1 | 3518117 | | 0 | Incyte Unique |
| 501 | 337953.2 | 1378835 | | 0 | Incyte Unique |
| 502 | 337953.5 | 1378835 | | 0 | Incyte Unique |
| 503 | 346431.1 | 2723937 | | 0 | Incyte Unique |
| 504 | 368357.1 | 5085077 | | 0 | Incyte Unique |
| 505 | 390546.1 | 5339122 | | 0 | Incyte Unique |
| 506 | 400267.1 | 4240272 | | 0 | Incyte Unique |
| 507 | 402288.1 | 3871646 | | 0 | Incyte Unique |
| 508 | 403407.2 | 1316042 | | 0 | Incyte Unique |
| 509 | 405447.1 | 3220727 | | 0 | Incyte Unique |
| 510 | 407485.1 | 5552541 | | 0 | Incyte Unique |
| 511 | 427832.19 | 3692235 | | 0 | Incyte Unique |
| 512 | 477913.1 | 2593092 | | 0 | Incyte Unique |
| 513 | 902956.2 | 2607572 | | 0 | Incyte Unique |
| 514 | 979367.4 | 2998372 | | 0 | Incyte Unique |
| 515 | 979367.5 | 2998372 | | 0 | Incyte Unique |
| 516 | 982861.1 | 3888854 | | 0 | Incyte Unique |
| 517 | 983351.1 | 1819244 | | 0 | Incyte Unique |
| 518 | 984637.1 | 1610772 | | 0 | Incyte Unique |
| 519 | 984900.1 | 1802185 | | 0 | Incyte Unique |

[0175] TABLE 3

| SEQ ID NO | Template ID | Clone ID | Start | Stop |
|---|---|---|---|---|
| 1 | 1867417CB1 | 1357231 | 3074 | 3751 |
| 2 | 1970111CB1 | 1970111 | 1059 | 2805 |
| 3 | 959142CB1 | 1930447 | 4830 | 5369 |
| 4 | 064684.7 | 1824717 | 9 | 655 |
| 5 | 245093.34 | 958486 | 2723 | 3083 |
| 6 | 331908.5 | 1995457 | 3146 | 3716 |
| 7 | 1329880.35 | 5150602 | 3980 | 4759 |
| 8 | 963555.1 | 2820294 | 3306 | 3835 |
| 9 | 199471.2 | 2047549 | 148 | 1452 |
| 10 | 048849.1 | 1358605 | 243 | 654 |
| 11 | 278283.1 | 4180161 | 1 | 85 |
| 12 | 978433CB1 | 1869068 | 513 | 903 |
| 13 | 611514CB1 | 605219 | 1131 | 1679 |
| 14 | 1382907.35 | 1888708 | 6880 | 7488 |
| 15 | 350509.2 | 1510413 | 5890 | 6572 |
| 16 | 2512879CB1 | 2512879 | 130 | 1418 |
| 17 | 241123.1 | 3876732 | 667 | 1255 |
| 18 | 247817.4 | 1480063 | 4916 | 5331 |
| 19 | 1674368CB1 | 1241484 | 3525 | 3926 |
| 20 | 343963.1 | 2671006 | 3173 | 3987 |
| 21 | 273154CB1 | 2899786 | 13 | 4831 |
| 22 | 331508.4 | 1967759 | 3466 | 4070 |
| 23 | 1137924.1 | 1480479 | 2178 | 2679 |
| 24 | 247168.4 | 2278925 | 835 | 1671 |
| 25 | 2275817CB1 | 224996 | 1690 | 2282 |
| 26 | 2717806CB1 | 4918603 | 81 | 2260 |
| 27 | 407624.1 | 3771805 | 1 | 1009 |
| 28 | 3950154CB1 | 2748163 | 3041 | 3582 |
| 29 | 3741842CB1 | 1988080 | 3263 | 3973 |
| 30 | 221055.4 | 2718391 | 2218 | 2672 |
| 31 | 379425CB1 | 433622 | 1203 | 1858 |
| 32 | 1685090CB1 | 2721792 | 51 | 503 |
| 33 | 350476.1 | 123312 | 2919 | 4276 |
| 33 | 350476.1 | 4044520 | 3335 | 4279 |
| 33 | 350476.1 | 123312 | 2919 | 4276 |
| 33 | 350476.1 | 4044520 | 3335 | 4279 |
| 34 | 404278.1 | 3116479 | 1233 | 1641 |
| 35 | 1250492CB1 | 1361644 | 1420 | 1954 |
| 36 | 200095.2 | 3125685 | 498 | 945 |
| 37 | 997405.3 | 1240444 | 419 | 810 |
| 38 | 235369.10 | 1965041 | 3846 | 4581 |
| 39 | 236587.4 | 1362125 | 2251 | 2715 |
| 40 | 1135936.1 | 4271973 | 661 | 1039 |
| 41 | 251123.6 | 3557441 | 1451 | 1951 |
| 41 | 251123.6 | 2600963 | 236 | 1946 |
| 41 | 251123.6 | 3557441 | 1451 | 1951 |
| 41 | 251123.6 | 2600963 | 236 | 1946 |
| 42 | 2547002CB1 | 2475740 | 1 | 1339 |
| 43 | 251123.8 | 3557441 | 949 | 1356 |
| 44 | 1000172.35 | 3645309 | 1 | 362 |
| 45 | 2921920CB1 | 1498363 | 520 | 1103 |
| 46 | 631645CB1 | 1274935 | 67 | 626 |
| 46 | 631645CB1 | 1274935 | 67 | 626 |
| 46 | 631645CB1 | 1577756 | 27 | 412 |
| 47 | 1507546CB1 | 3507734 | 904 | 1196 |
| 48 | 1508437CB1 | 1376121 | 322 | 959 |
| 48 | 1508437CB1 | 1607091 | 220 | 959 |
| 48 | 1508437CB1 | 1376121 | 322 | 959 |
| 48 | 1508437CB1 | 1607091 | 220 | 959 |
| 49 | 1100669.4 | 1675122 | 467 | 972 |
| 50 | 124600CB1 | 1578941 | 38 | 611 |
| 51 | 470771.11 | 322066 | 706 | 1444 |
| 52 | 273259.4 | 2201411 | 1 | 565 |
| 53 | 5170638CB1 | 4014022 | 77 | 743 |
| 54 | 1330170.3 | 4221057 | 31 | 304 |
| 55 | 1383898.2 | 1499549 | 1 | 620 |
| 56 | 019238.3 | 1430507 | 728 | 1579 |
| 57 | 1102296.5 | 3026658 | 15 | 288 |
| 58 | 995673.3 | 2149968 | 314 | 862 |
| 58 | 995673.3 | 4215545 | 322 | 837 |
| 58 | 995673.3 | 2149968 | 314 | 862 |
| 58 | 995673.3 | 4215545 | 322 | 837 |
| 59 | 312256CB1 | 313697 | 1014 | 1463 |
| 60 | 199183.2 | 2763310 | 18 | 700 |
| 61 | 289671.40 | 3678546 | 1 | 506 |
| 62 | 154403.1 | 2050104 | 82 | 202 |
| 63 | 086518.22 | 1987759 | 175 | 393 |
| 64 | 1383156.10 | 311197 | 59 | 724 |
| 65 | 1100669.3 | 1675122 | 119 | 356 |
| 66 | 1330148.1 | 3867795 | 1 | 136 |
| 67 | 1436702CB1 | 1358185 | 907 | 2847 |
| 68 | 3141226CB1 | 3625857 | 725 | 1161 |
| 69 | 289671.44 | 970905 | 801 | 1217 |
| 70 | 197927.7 | 2417149 | 4 | 392 |
| 71 | 1134834.2 | 1911306 | 1 | 389 |
| 72 | 200273.1 | 2721144 | 19 | 775 |
| 73 | 477974.1 | 3117677 | 1 | 231 |
| 74 | 235095.7 | 1809377 | 826 | 1247 |
| 75 | 407593.1 | 205053 | 1020 | 1277 |
| 76 | 332301.1 | 1417150 | 645 | 1230 |
| 77 | 407699.4 | 1919860 | 1546 | 1959 |
| 78 | 405501.1 | 2593077 | 270 | 755 |
| 79 | 482541.2 | 2685454 | 900 | 1217 |
| 80 | 237026.3 | 2963374 | 111 | 1470 |
| 81 | 443605.4 | 3556587 | 359 | 947 |
| 82 | 443605.15 | 3556587 | 491 | 680 |
| 83 | 029997.1 | 3638532 | 1 | 489 |
| 84 | 331743.9 | 789903 | 6102 | 6915 |
| 85 | 337334.1 | 3220029 | 4222 | 4954 |
| 86 | 410438.2 | 1879818 | 2054 | 2460 |
| 87 | 453004.32 | 2394888 | 2871 | 3305 |
| 88 | 236319.2 | 3044230 | 1282 | 3990 |
| 89 | 978118.5 | 2508618 | 66 | 1524 |
| 90 | 1383177.16 | 1646505 | 3022 | 3654 |
| 91 | 1383298.1 | 1510539 | 1403 | 1763 |
| 92 | 1000222.20 | 1729693 | 1008 | 1319 |
| 93 | 1096863.27 | 1303863 | 3824 | 5091 |
| 94 | 245334.1 | 2380412 | 1301 | 1932 |
| 95 | 1656674CB1 | 2222802 | 1173 | 1622 |
| 96 | 522678CB1 | 2199851 | 1804 | 2300 |
| 97 | 1424985CB1 | 2150615 | 957 | 1509 |
| 98 | 1468237CB1 | 1573505 | 451 | 2131 |
| 99 | 337008.1 | 1599272 | 1108 | 1571 |
| 100 | 444850.9 | 2860704 | 2676 | 2975 |
| 101 | 786284CB1 | 1458210 | 1507 | 1881 |
| 102 | 1352170CB1 | 1988092 | 2751 | 3158 |
| 103 | 1815320CB1 | 1742116 | 2617 | 3234 |
| 104 | 331192.11 | 2007554 | 1584 | 2105 |
| 105 | 344053.5 | 2928545 | 1 | 487 |
| 106 | 411188.2 | 4247796 | 3887 | 4272 |
| 107 | 331510.4 | 3814138 | 5491 | 6057 |
| 108 | 492750CB1 | 2732630 | 2415 | 3688 |
| 109 | 348912.4 | 1716655 | 1033 | 1392 |
| 110 | 2680109CB1 | 2125020 | 51 | 2410 |
| 110 | 2680109CB1 | 2242677 | 2015 | 2150 |
| 110 | 2680109CB1 | 2125020 | 51 | 2410 |
| 110 | 2680109CB1 | 2242677 | 2015 | 2150 |
| 111 | 512261CB1 | 512261 | 1433 | 1788 |
| 112 | 232719.2 | 1848259 | 4889 | 5167 |
| 113 | 369664.2 | 3119171 | 142 | 551 |
| 114 | 021042.1 | 2879922 | −23 | 268 |
| 115 | 418805.7 | 1637320 | 7437 | 7843 |
| 116 | 1094000.4 | 1397816 | 1344 | 1667 |
| 117 | 1094000.5 | 1380927 | 854 | 1537 |
| 118 | 1222734CB1 | 1300701 | 1331 | 1717 |
| 118 | 1222734CB1 | 1397816 | 1342 | 1708 |
| 118 | 1222734CB1 | 1300701 | 1331 | 1717 |
| 118 | 1222734CB1 | 1397816 | 1342 | 1708 |
| 119 | 411205.5 | 1420883 | 2446 | 2877 |
| 120 | 1092777.6 | 1643711 | 148 | 635 |
| 121 | 234358.5 | 1996180 | 2099 | 2743 |
| 122 | 1092777.7 | 1643711 | 1193 | 1684 |
| 123 | 4180444CB1 | 3872317 | 5376 | 5711 |
| 124 | 1987983CB1 | 690819 | 213 | 519 |
| 125 | 1398420.2 | 4655050 | 6 | 1227 |
| 126 | 1749102CB1 | 1749102 | 51 | 1535 |
| 127 | 2965804GB | 12965804 | 249 | 1858 |
| 128 | 210095.21 | 1285926 | 894 | 1583 |
| 129 | 1555752CB1 | 42248 | 1956 | 2146 |
| 130 | 110245.1 | 3028719 | 1 | 396 |
| 131 | 009476CB1 | 2017386 | 1326 | 1690 |
| 132 | 1560874CB1 | 3815942 | 1230 | 1518 |
| 133 | 3571894CB1 | 2132715 | 3322 | 3854 |
| 134 | 349622.1 | 2055903 | 325 | 681 |
| 135 | 002940CB1 | 1679482 | 709 | 1223 |
| 136 | 1362466CB1 | 1834502 455 | 1509 | |
| 137 | 383376.19 | 4461157 | 428 | 997 |
| 138 | 1382961.3 | 3184882 | 1080 | 1401 |
| 139 | 1382961.1 | 54382348 | 1090 | 1204 |
| 140 | 1454852CB1 | 793403 | 891 | 1305 |
| 141 | 2161632CB1 | 954057 | 3078 | 3462 |
| 142 | 2058013CB1 | 1968413 | 2472 | 3001 |
| 143 | 235333.1 | 1684632 | 3737 | 4318 |
| 144 | 702628CB1 | 2418629 | 736 | 1832 |
| 145 | 1383415.3 | 1420380 | 2534 | 3186 |
| 146 | 236309.1 | 2925376 | 1420 | 1959 |
| 147 | 344868.13 | 3333118 | 1931 | 2322 |
| 148 | 368869.15 | 100602 | 1 | 821 |
| 149 | 3256566CB1 | 1666069 | 1777 | 2347 |
| 150 | 4104673CB1 | 4104673 | 1 | 1532 |
| 151 | 345511.2 | 4243318 | 111 | 462 |
| 152 | 1723834CB1 | 1723834 | 2901 | 3240 |
| 153 | 078756CB1 | 490795 | 2952 | 3202 |
| 154 | 331749.3 | 1628341 | 264 | 748 |
| 155 | 350528.7 | 1429293 | 2258 | 2819 |
| 156 | 1099159.1 | 1519404 | 192 | 406 |
| 157 | 1530186CB1 | 3715059 | 3278 | 4655 |
| 158 | 1092387.11 | 2674527 | 1078 | 1530 |
| 159 | 107939.2 | 2313581 | 2837 | 3302 |
| 160 | 899248.6 | 1832584 | 2558 | 3052 |
| 161 | 2959521CB1 | 87727 | 1538 | 1779 |
| 162 | 3331519CB1 | 2197965 | 3205 | 3861 |
| 163 | 1453334CB1 | 1445547 | 1416 | 2292 |
| 164 | 2798854CB1 | 4385292 | 1174 | 3091 |
| 165 | 227961.1 | 2742979 | 30 | 1490 |
| 166 | 1427470CB1 | 1430862 | 768 | 1588 |
| 167 | 206250.6 | 2180220 | 736 | 1789 |
| 168 | 995068.15 | 893230 | 468 | 1015 |
| 169 | 2545475CB1 | 1981569 | 2829 | 3230 |
| 170 | 1502559CB1 | 1502559 | 198 | 1580 |
| 171 | 2239738CB1 | 22397381 | 264 | 1909 |
| 172 | 347572.1 | 1501621 | 2094 | 3288 |
| 173 | 977985.10 | 1445387 | 15 | 583 |
| 174 | 236582.2 | 2720359 | 1 | 585 |
| 175 | 403676.1 | 1656490 | 1085 | 1990 |
| 176 | 138472CB1 | 2373085 | 1105 | 1780 |
| 177 | 253672.11 | 2851539 | 32 | 844 |
| 178 | 201928.3 | 2126712 | 2952 | 3429 |
| 179 | 198643.1 | 2187262 | 615 | 1263 |
| 180 | 979448.2 | 1497012 | 292 | 1817 |
| 181 | 460745.7 | 1381145 | 2892 | 3277 |
| 182 | 399300.18 | 2842978 | 2048 | 2428 |
| 183 | 248091.1 | 1607083 | 1228 | 1726 |
| 184 | 4030737CB1 | 2440848 | 1918 | 2439 |
| 185 | 3012575CB1 | 3012575 | 1372 | 2214 |
| 186 | 221827.1 | 2057406 | 59 | 513 |
| 187 | 238660.5 | 1604437 | 5456 | 5898 |
| 188 | 2171401CB1 | 2055814 | 854 | 1639 |
| 189 | 1420940CB1 | 1603408 | 1557 | 1775 |
| 190 | 1383160.14 | 1834906 | 53 | 610 |
| 191 | 233331.8 | 2154725 | 3246 | 3983 |
| 192 | 338217.10 | 1989545 | 2002 | 3687 |
| 193 | 5982278CB1 | 2640427 | 2624 | 3278 |
| 194 | 1097030.1 | 1760232 | 9300 | 10053 |
| 195 | 1100509.4 | 2215183 | 1705 | 2127 |
| 196 | 199671.1 | 1694119 | 2390 | 2978 |
| 197 | 232137.20 | 2053221 | 2799 | 3373 |
| 198 | 898608.2 | 3112520 | 1552 | 1669 |
| 199 | 411373.3 | 1625856 | 3912 | 4539 |
| 200 | 1092387.17 | 2070554 | 96 | 1273 |
| 201 | 201906.5 | 3733666 | 1140 | 1547 |
| 202 | 3607580CB1 | 3607580 | 2034 | 2829 |
| 203 | 991163CB1 | 1809178 | 933 | 1346 |
| 204 | 1309633.1 | 1880421 | 1868 | 2234 |
| 205 | 1384719.29 | 4372330 | 45 | 1713 |
| 206 | 178250.2 | 3075015 | 484 | 1011 |
| 207 | 1099945.13 | 1911742 | 5804 | 6313 |
| 208 | 2172334CB1 | 2172334 | 956 | 2250 |
| 209 | 253946.17 | 3625189 | 6204 | 6758 |
| 210 | 008513.49 | 2057510 | 1721 | 2258 |
| 211 | 1092257.2 | 1447795 | 1529 | 2772 |
| 211 | 1092257.2 | 1962235 | 2348 | 2796 |
| 211 | 1092257.2 | 3440567 | 2334 | 2777 |
| 211 | 1092257.2 | 1447795 | 1529 | 2772 |
| 211 | 1092257.2 | 1962235 | 2348 | 2796 |
| 211 | 1092257.2 | 3440567 | 2334 | 2777 |
| 211 | 1092257.2 | 1447795 | 1529 | 2772 |
| 211 | 1092257.2 | 1962235 | 2348 | 2796 |
| 211 | 1092257.2 | 3440567 | 2334 | 2777 |
| 212 | 4349106CB1 | 2820861 | 103 | 344 |
| 213 | 1814803CB1 | 1698951 | 1303 | 2084 |
| 214 | 1141764.8 | 1926114 | 1559 | 2161 |
| 215 | 406531.1 | 1603580 | 3326 | 3581 |
| 216 | 429307.4 | 3144021 | 1 | 374 |
| 217 | 239515.9 | 1675369 | 766 | 1201 |
| 218 | 1089210.1 | 5033671 | 34 | 1152 |
| 219 | 010796.18 | 1445895 | 879 | 1402 |
| 220 | 3752346CB1 | 1378037 | 577 | 1140 |
| 221 | 2729828CB1 | 1858171 | 1039 | 1673 |
| 222 | 1648579CB1 | 3142624 | 419 | 1638 |
| 223 | 1454418CB1 | 1468660 | 625 | 1167 |
| 224 | 995529.10 | 2957476 | 878 | 1254 |
| 225 | 2126751CB1 | 2126751 | 899 | 1528 |
| 226 | 569648CB1 | 2720467 | 526 | 1777 |
| 227 | 1352789CB1 | 3000146 | 47 | 872 |
| 228 | 1635966CB1 | 2046165 | 492 | 846 |
| 229 | 349415.6 | 3074415 | 3847 | 3974 |
| 230 | 406438.14 | 2797787 | 1529 | 2009 |
| 231 | 1471808CB1 | 3074415 | 1 | 501 |
| 232 | 245595.1 | 2052480 | 2023 | 2444 |
| 233 | 2784232CB1 | 3151158 | 1042 | 1764 |
| 234 | 2742913CB1 | 2516950 | 75 | 1693 |
| 235 | 1509972CB1 | 4047785 | 1133 | 1204 |
| 236 | 1097638.1 | 1903760 | 142 | 604 |
| 237 | 900035.58 | 1900306 | 786 | 6912 |
| 237 | 900035.58 | 5186773 | 5391 | 5851 |
| 237 | 900035.58 | 1900306 | 786 | 6912 |
| 237 | 900035.58 | 5186773 | 5391 | 5851 |
| 238 | 1075592.61 | 423848 | 4204 | 4771 |
| 239 | 984540.11 | 393337 | 1648 | 2198 |
| 240 | 378633.40 | 1821938 | 583 | 1119 |
| 241 | 477387.73 | 100048 | 1253 | 1700 |
| 242 | 347049.92 | 057158 | 2011 | 3007 |
| 243 | 1097717.18 | 5065213 | 346 | 1556 |
| 244 | 2832214CB1 | 2832214 | 6 | 1181 |
| 245 | 2947513CB1 | 5984038 | 22 | 502 |
| 246 | 1655369CB1 | 2056840 | 1867 | 2504 |
| 247 | 039170.3 | 2418484 | 106 | 532 |
| 248 | 1074926.1 | 2947513 | −11 | 292 |
| 249 | 344297.5 | 62144 | 721 | 908 |
| 250 | 410721.1 | 4688 | 1276 | 1548 |
| 251 | 1121097.1 | 1450641 | 2382 | 3709 |
| 252 | 1097450.22 | 3374194 | 55 | 301 |
| 253 | 238533.1 | 2790947 | 3027 | 3560 |
| 254 | 1097080.8 | 2694381 | 1400 | 1595 |
| 255 | 1097450.20 | 3374194 | 464 | 939 |
| 256 | 2514988CB1 | 1886886 | 809 | 1277 |
| 257 | 3130485CB1 | 1987238 | 407 | 1382 |
| 258 | 1330234.11 | 5392723 | 91 | 1528 |
| 259 | 1943624CB1 | 1943624 | 941 | 1440 |
| 260 | 2189816CB1 | 2189816 | 202 | 575 |
| 261 | 039027.1 | 3861522 | 1 | 223 |
| 262 | 2502336CB1 | 2507719 | 473 | 1659 |
| 263 | 3592543CB1 | 5066393 | 931 | 1312 |
| 264 | 399589.1 | 2070856 | 1574 | 2021 |
| 265 | 2175401CB1 | 1833174 | 763 | 1582 |
| 266 | 084455.9 | 1356268 | 1748 | 1920 |
| 267 | 233041.5 | 2060622 | 2750 | 3422 |
| 268 | 1382961.5 | 3184882 | 1 | 518 |
| 269 | 1518310CB1 | 1518310 | 1692 | 2154 |
| 270 | 1517817CB1 | 1402078 | 264 | 976 |
| 271 | 3090387CB1 | 1714684 | 747 | 1078 |
| 272 | 3836893CB1 | 3836893 | 365 | 881 |
| 273 | 394121.2 | 2796118 | 31 | 561 |
| 274 | 2347046CB1 | 2347046 | 7 | 847 |
| 275 | 1137894.1 | 2059420 | 1947 | 2552 |
| 276 | 1137536.4 | 1753015 | 189 | 531 |
| 277 | 2501808CB1 | 2501808 | 19 | 858 |
| 278 | 4767318CB1 | 3088261 | 961 | 1243 |
| 279 | 1223705CB1 | 1633118 | 504 | 986 |
| 280 | 296696.7 | 851875 | 203 | 1455 |
| 281 | 410320.1 | 2886536 | 1 | 546 |
| 282 | 426109.1 | 2057823 | 526 | 1043 |
| 283 | 1098589.27 | 2152363 | 348 | 729 |
| 284 | 233575.1 | 1222942 | 237 | 962 |
| 285 | 235191.4 | 1997915 | 213 | 782 |
| 286 | 468221.19 | 1662856 | 992 | 1313 |
| 287 | 986342.1 | 2811372 | 4490 | 4916 |
| 288 | 240120.3 | 2795141 | 572 | 1600 |
| 289 | 5511889CB1 | 6105902 | 1789 | 2336 |
| 290 | 3009578CB1 | 3009578 | 672 | 1239 |
| 291 | 982520.1 | 4821815 | 1559 | 2423 |
| 292 | 899156.36 | 2851850 | 1209 | 1525 |
| 293 | 1748428CB1 | 1658215 | 933 | 1395 |
| 294 | 238540.1 | 1608244 | 119 | 194 |
| 295 | 898495.3 | 5261507 | 1 | 581 |
| 296 | 369213.48 | 1292449 | 656 | 1542 |
| 297 | 3084563CB1 | 5834427 | 1436 | 1845 |
| 298 | 237613.7 | 1975550 | 2232 | 2858 |
| 299 | 2630652CB1 | 2152363 | 462 | 922 |
| 300 | 5785224CB1 | 1212335 | 931 | 1583 |
| 301 | 409911.8 | 2219364 | 246 | 989 |
| 302 | 2418523CB1 | 2454639 | 49 | 1172 |
| 303 | 1091297.30 | 2418490 | 168 | 635 |
| 304 | 369213.2 | 2200842 | 5 | 737 |
| 305 | 221869.5 | 5523515 | 70 | 357 |
| 306 | 995529.6 | 2957476 | 1993 | 2553 |
| 307 | 982959.1 | 3115823 | 2164 | 4269 |
| 308 | 342074.1 | 4408943 | 1 | 487 |
| 309 | 245194.2 | 1512826 | 709 | 1216 |
| 310 | 246444.6 | 3382391 | 20 | 853 |
| 311 | 374054.4 | 3843227 | 805 | 1333 |
| 312 | 001322.4 | 2663164 | 1069 | 3206 |
| 313 | 406438.12 | 2797787 | 313 | 502 |
| 314 | 1382961.12 | 4382348 | 1408 | 1786 |
| 315 | 1359783CB1 | 3138721 | 1545 | 2281 |
| 316 | 1796035CB1 | 3986547 | 84 | 524 |
| 317 | 444850.11 | 2860704 | 1 | 479 |
| 318 | 236062CB1 | 2238411 | 677 | 1143 |
| 319 | 333238.12 | 2833637 | 2398 | 2661 |
| 320 | 475547.2 | 1955363 | 2587 | 3041 |
| 321 | 977929.1 | 4112181 | 1192 | 1685 |
| 322 | 1362715CB1 | 1816113 | 61 | 531 |
| 323 | 3117642CB1 | 3117642 | 272 | 640 |
| 324 | 2026270CB1 | 2026270 | 532 | 800 |
| 325 | 981662.2 | 4401727 | 1 | 433 |
| 326 | 453004.10 | 2394888 | 1000 | 1393 |
| 327 | 978147.7 | 2784394 | 468 | 1899 |
| 328 | 2132626CB1 | 541875 | 724 | 1279 |
| 329 | 402716.37 | 4199466 | 1123 | 1384 |
| 330 | 464482.1 | 625374 | 20 | 811 |
| 331 | 402716.20 | 4199466 | 2052 | 2508 |
| 332 | 1137710.5 | 1713191 | −14 | 177 |
| 333 | 348912.3 | 1716655 | 1 | 533 |
| 334 | 474926.11 | 2512203 | 3202 | 3716 |
| 335 | 406804.4 | 3130454 | 1581 | 2299 |
| 336 | 480855.1 | 3234063 | 572 | 1000 |
| 337 | 238593.5 | 211779 | 675 | 1163 |
| 338 | 373514.7 | 4740251 | 1 | 508 |
| 339 | 1383354.10 | 5057204 | 6 | 470 |
| 340 | 3120070CB1 | 3120070 | 351 | 1931 |
| 341 | 253987.19 | 2232658 | 1707 | 2066 |
| 342 | 133425.16 | 3510656 | 174 | 1414 |
| 343 | 468221.18 | 1662856 | 257 | 765 |
| 344 | 020093.8 | 2102756 | 487 | 926 |
| 345 | 1556751CB1 | 1986121 | 635 | 1379 |
| 346 | 1397976.1 | 4628258 | 1 | 1534 |
| 347 | 233828.16 | 1362831 | 870 | 1224 |
| 348 | 1253414CB1 | 5681633 | 802 | 1177 |
| 349 | 1101068.1 | 5856402 | 399 | 859 |
| 350 | 006922.1 | 2934515 | 1 | 257 |
| 351 | 333398.5 | 2456903 | 1 | 420 |
| 352 | 235725.21 | 2095728 | 145 | 564 |
| 353 | 242472.14 | 4572916 | 1 | 509 |
| 354 | 253550.20 | 3397390 | 345 | 737 |
| 355 | 216262.3 | 3813934 | 1 | 555 |
| 356 | 235191.3 | 1997915 | 4 | 465 |
| 357 | 480337.45 | 4602215 | 509 | 796 |
| 358 | 199939.6 | 1858415 | 1177 | 1726 |
| 359 | 201204.9 | 4088394 | 1 | 634 |
| 360 | 201887.2 | 3478024 | 1 | 728 |
| 361 | 1136056.1 | 3527982 | 3200 | 3976 |
| 362 | 994977.1 | 3722056 | 1 | 272 |
| 363 | 888669.8 | 4721466 | 186 | 668 |
| 364 | 345860.20 | 5160686 | 734 | 1719 |
| 365 | 480337.43 | 1459082 | 321 | 851 |
| 365 | 480337.43 | 4602215 | 1 | 347 |
| 365 | 480337.43 | 1459082 | 321 | 851 |
| 365 | 480337.43 | 4602215 | 1 | 347 |
| 366 | 399300.14 | 2842978 | 1 | 444 |
| 367 | 368015.2 | 3115792 | 21 | 538 |
| 368 | 227550.1 | 3771020 | 1 | 1611 |
| 369 | 201906.6 | 3733666 | 439 | 850 |
| 370 | 349589.10 | 127321 | 165 | 543 |
| 371 | 3713867CB1 | 2061401 | 1852 | 2214 |
| 372 | 235943.27 | 2957567 | 1 | 717 |
| 373 | 241742.1 | 1295905 | 2642 | 2895 |
| 374 | 333680.1 | 3138456 | 2152 | 2344 |
| 375 | 411429.3 | 1424886 | 72 | 500 |
| 376 | 2356055CB1 | 2356055 | 52 | 994 |
| 377 | 239579.3 | 1704713 | 3029 | 3430 |
| 378 | 332240.1 | 2201507 | 2044 | 2648 |
| 379 | 255161.1 | 2270986 | 88 | 425 |
| 380 | 2454384CB1 | 2454384 | 195 | 763 |
| 381 | 1383298.3 | 1510539 | 309 | 789 |
| 382 | 383376.7 | 5551761 | 138 | 483 |
| 383 | 230816.1 | 1526322 | 345 | 1072 |
| 384 | 211949.2 | 1966295 | 1538 | 2202 |
| 385 | 238853.42 | 1450886 | 6 | 370 |
| 386 | 333165.2 | 1682337 | 2755 | 3521 |
| 387 | 344868.12 | 3333118 | 360 | 882 |
| 388 | 148304.14 | 3646303 | 281 | 814 |
| 389 | 247747.6 | 3124204 | 272 | 835 |
| 390 | 001153.12 | 5546984 | 1 | 398 |
| 391 | 1095728.19 | 414480 | 68 | 752 |
| 392 | 222604.7 | 2745735 | 502 | 776 |
| 393 | 1094984.14 | 2620487 | 0 | 544 |
| 394 | 400702.1 | 1969974 | 280 | 814 |
| 395 | 196557.1 | 1927026 | 442 | 874 |
| 396 | 237208.5 | 993365 | 1694 | 2020 |
| 397 | 337792.2 | 1832594 | 1229 | 1870 |
| 398 | 398970.3 | 4885619 | 1 | 497 |
| 399 | 1309633.3 | 1880421 | 388 | 662 |
| 400 | 981662.1 | 4401727 | 93 | 576 |
| 401 | 081187.1 | 2416447 | 1 | 64 |
| 402 | 086533.6 | 219839 | 954 | 1430 |
| 403 | 1093481.2 | 1962139 | 1177 | 1417 |
| 404 | 024494.7 | 1938744 | 5 | 461 |
| 405 | 888669.7 | 4721466 | 430 | 889 |
| 406 | 428206.1 | 2675284 | 877 | 1216 |
| 407 | 1328026.7 | 549728 | 2073 | 2667 |
| 408 | 475113.7 | 1700462 | 2797 | 3289 |
| 409 | 204392.5 | 2950394 | 236 | 615 |
| 410 | 1092257.12 | 3440567 | 1 | 532 |
| 411 | 1134990.3 | 3878116 | 751 | 1092 |
| 412 | 1095223.13 | 4158982 | 1 | 371 |
| 413 | 214654.1 | 1681727 | 1333 | 2088 |
| 414 | 086533.5 | 219839 | 325 | 900 |
| 415 | 474117.5 | 3992320 | −27 | 997 |
| 416 | 410812.1 | 3380665 | 0 | 573 |
| 417 | 011822.2 | 2887646 | 1 | 730 |
| 418 | 252899.7 | 2811710 | 1692 | 2837 |
| 419 | 1511488CB1 | 1511488 | 439 | 984 |
| 420 | 1383797.1 | 1466844 | 677 | 1059 |
| 421 | 400745.1 | 4205017 | 629 | 1348 |
| 422 | 029618.1 | 1223877 | 333 | 798 |
| 423 | 245722.8 | 2508079 | 19 | 1220 |
| 424 | 981488.1 | 2159213 | 51 | 951 |
| 424 | 981488.1 | 2449016 | 2332 | 2708 |
| 424 | 981488.1 | 2159213 | 51 | 951 |
| 424 | 981488.1 | 2449016 | 2332 | 2708 |
| 425 | 241858.1 | 4460483 | 1 | 392 |
| 426 | 1466276CB1 | 739191 | 1 | 1043 |
| 427 | 999386.3 | 5286390 | 340 | 1331 |
| 428 | 1091079.8 | 1503624 | 643 | 1329 |
| 429 | 407084.1 | 3423374 | 143 | 486 |
| 430 | 215642.2 | 1923709 | 2475 | 2828 |
| 431 | 1159769.1 | 3929017 | 27 | 826 |
| 432 | 482336.31 | 4104390 | 1467 | 2046 |
| 433 | 064703.1 | 1900111 | 1 | 555 |
| 434 | 294837.1 | 3255489 | 621 | 1064 |
| 435 | 982699.1 | 5394922 | 1 | 338 |
| 436 | 015126.1 | 4361169 | 94 | 349 |
| 437 | 235132.10 | 5682290 | 88 | 600 |
| 438 | 1070092.1 | 2965648 | −7 | 660 |
| 439 | 272599.1 | 2278772 | 1 | 278 |
| 440 | 415901.1 | 2998131 | −8 | 314 |
| 441 | 477387.3 | 3100048 | 1 | 439 |
| 442 | 208702.1 | 3658444 | 407 | 725 |
| 443 | 1135039.1 | 899118 | 2167 | 2457 |
| 444 | 232649.2 | 2234640 | 1483 | 2043 |
| 445 | 340450.1 | 4639995 | 1 | 225 |
| 446 | 320660.1 | 5034026 | 1 | 380 |
| 447 | 467104.21 | 2054055 | 2671 | 3274 |
| 448 | 332382.1 | 3999569 | 1 | 554 |
| 449 | 2104530CB1 | 2104530 | 139 | 463 |
| 450 | 007228.1 | 60306 | 635 | 846 |
| 451 | 008098.1 | 313312 | 49 | 739 |
| 452 | 016124.2 | 3732960 | 31 | 391 |
| 453 | 016149.1 | 3736058 | 1 | 363 |
| 454 | 025731.1 | 2586554 | 1093 | 1355 |
| 455 | 026856.1 | 1300730 | 1 | 711 |
| 456 | 028918.1 | 2800380 | 278 | 951 |
| 457 | 032481.1 | 4073339 | 937 | 1338 |
| 458 | 045630.1 | 1269876 | 1 | 462 |
| 459 | 047533.1 | 4276910 | 198 | 635 |
| 460 | 072540.1 | 2152929 | 165 | 691 |
| 461 | 076580.1 | 2264967 | 132 | 562 |
| 462 | 1072776.1 | 5505238 | 68 | 334 |
| 463 | 1100233.1 | 3725970 | 1 | 527 |
| 464 | 1102220.2 | 1299351 | 4246 | 4789 |
| 465 | 1328508.1 | 2669974 | 1215 | 1910 |
| 466 | 1383457.1 | 5024278 | 398 | 1014 |
| 467 | 140230.5 | 1211835 | 516 | 1070 |
| 468 | 150868.1 | 491129 | 208 | 467 |
| 469 | 172582.1 | 5622463 | 1 | 841 |
| 470 | 175536.1 | 122943 | 522 | 1216 |
| 470 | 175536.1 | 5187276 | 1238 | 2039 |
| 470 | 175536.1 | 122943 | 522 | 1216 |
| 470 | 175536.1 | 5187276 | 1238 | 2039 |
| 471 | 176928.1 | 2782090 | 1 | 389 |
| 472 | 197252.1 | 2656358 | 685 | 1675 |
| 473 | 1975480CB1 | 3852527 | 35 | 317 |
| 474 | 200578.1 | 473724 | 1662 | 2308 |
| 475 | 202117.4 | 1402988 | 593 | 1223 |
| 476 | 204750.3 | 2021485 | 17 | 401 |
| 477 | 205232.1 | 1379153 | 276 | 702 |
| 478 | 212157.1 | 3130003 | 132 | 610 |
| 479 | 221846.4 | 4116336 | 1 | 624 |
| 480 | 222092.1 | 2154847 | −96 | 381 |
| 481 | 228350.1 | 2605849 | 809 | 1435 |
| 482 | 229170.1 | 1818484 | 1 | 525 |
| 483 | 230820.1 | 3120378 | 1 | 617 |
| 484 | 231160.1 | 1848676 | 49 | 737 |
| 485 | 232212.1 | 1866738 | 39 | 415 |
| 486 | 234090.1 | 1718918 | 3061 | 3745 |
| 487 | 236432.1 | 3322032 | 400 | 1116 |
| 488 | 236497.1 | 1682609 | 128 | 781 |
| 489 | 237208.4 | 993365 | 12 | 552 |
| 490 | 2484813CB1 | 1338090 | 1953 | 2463 |
| 491 | 249104.1 | 2394947 | 1 | 657 |
| 492 | 287241.1 | 3412108 | 1 | 252 |
| 493 | 316571.1 | 5185101 | 1 | 632 |
| 494 | 331447.1 | 3363538 | 1406 | 1754 |
| 495 | 333127.1 | 153430 | 1 | 847 |
| 496 | 334025.5 | 3724351 | 85 | 469 |
| 497 | 334570.1 | 1296146 | 1 | 795 |
| 498 | 334814.1 | 1645745 | 1 | 367 |
| 499 | 335692.1 | 5023108 | 104 | 500 |
| 500 | 337407.1 | 3518117 | 284 | 748 |
| 501 | 337953.2 | 1378835 | 436 | 973 |
| 502 | 337953.5 | 1378835 | 1 | 261 |
| 503 | 346431.1 | 2723937 | 661 | 2265 |
| 504 | 368357.1 | 5085077 | 1 | 493 |
| 505 | 390546.1 | 5339122 | 1 | 282 |
| 506 | 400267.1 | 4240272 | 44 | 557 |
| 507 | 402288.1 | 3871646 | 304 | 728 |
| 508 | 403407.2 | 1316042 | 1 | 239 |
| 509 | 405447.1 | 3220727 | 207 | 528 |
| 510 | 407485.1 | 5552541 | 351 | 1226 |
| 511 | 427832.19 | 3692235 | 267 | 632 |
| 512 | 477913.1 | 2593092 | 1 | 85 |
| 513 | 902956.2 | 2607572 | 29 | 332 |
| 514 | 979367.4 | 2998372 | -112 | 170 |
| 515 | 979367.5 | 2998372 | 162 | 410 |
| 516 | 982861.1 | 3888854 | 36 | 545 |
| 517 | 983351.1 | 1819244 | 738 | 1922 |
| 518 | 984637.1 | 1610772 | 184 | 1164 |
| 519 | 984900.1 | 1802185 | 29 | 322 |

What is claimed is:

1. A combination comprising a plurality of cDNAs wherein the cDNAs are SEQ ID NOs:1-519 that are differentially expressed in respiratory disorders and the complements of SEQ ID NOs:1-519.

2. The combination of claim 1, wherein the cDNAs are SEQ ID NOs:1-12 that are differentially expressed at least 2.5-fold in respiratory disorders and the complements of SEQ ID NOs:1-12.

3. The combination of claim 1, wherein the cDNAs are SEQ ID NOs:13-83 that are differentially expressed at least 2.0-fold and the complements of SEQ ID NOs:13-83.

4. The combination of claim 1, wherein the cDNAs are SEQ ID NOs:98, 132, 135, 140, 145, 152, 174, 210, 223, 242, 246, 278, 304, 340, and 490 that are differentially expressed in squamous cell carcinoma thereby distinguishing squamous cell carcinoma from adenocarcinoma and the complements of SEQ ID NOs:98, 132, 135, 140, 145, 152, 174, 210, 223, 242, 246, 278, 304, 340, and 490.

5. The combination of claim 1, wherein the respiratory disorder is lung cancer, chronic obstructive pulmonary disease, emphysema, or asthma.

6. The combination of claim 1, wherein the cDNAs are immobilized on a substrate.

7. A method for detecting differential expression of one or more cDNAs in a sample containing nucleic acids, the method comprising:
a) hybridizing the substrate of claim 6 with nucleic acids of the sample, thereby forming one or more hybridization complexes;
b) detecting the hybridization complexes; and
c) comparing the hybridization complexes with those of a standard, wherein differences between the standard and sample hybridization complexes indicate differential expression of cDNAs in the sample.

8. The method of claim 7, wherein the nucleic acids of the sample are amplified prior to hybridization.

9. The method of claim 7, wherein the sample is from a subject with a respiratory disorder and comparison with a standard defines an early, mid, or late stage of that disorder.

10. A method of screening a plurality of molecules or compounds to identify a ligand which specifically binds a cDNA, the method comprising:
a) combining the combination of claim 1 with the plurality of molecules or compounds under conditions to allow specific binding; and
b) detecting specific binding between each cDNA and at least one molecule or compound, thereby identifying a ligand that specifically binds to each cDNA.

11. The method of claim 10 wherein the plurality of molecules or compounds are selected from DNA molecules, RNA molecules, peptide nucleic acid molecules, mimetics, peptides, transcription factors, repressors, and regulatory proteins.

12. An isolated cDNA comprising a nucleic acid sequence selected from SEQ ID NOs:12, 45, 51, 56, 64, 70, 72, 75-83, 344, 346, 375, 376, 377, 402, 406, 407, 412, 419, and 431.

13. A vector containing the cDNA of claim 12.

14. A host cell containing the vector of claim 13.

15. A method for producing a protein, the method comprising the steps of:
a) culturing the host cell of claim 14 under conditions for expression of protein; and
b) recovering the protein from the host cell culture.

16. A protein or a portion thereof produced by the method of claim 15.

17. A method for using a protein to screen a plurality of molecules or compounds to identify at least one ligand which specifically binds the protein, the method comprising:
a) combining the protein of claim 16 with the plurality of molecules or compounds under conditions to allow specific binding; and
b) detecting specific binding between the protein and a molecule or compound, thereby identifying a ligand which specifically binds the protein.

18. The method of claim 17 wherein the plurality of molecules or compounds is selected from agonists, antagonists, antibodies, DNA molecules, small molecule drugs, immunoglobulins, inhibitors, mimetics, peptide nucleic acids, peptides, pharmaceutical agents, proteins, RNA molecules, and ribozymes.

19. An antagonist identified by the method of claim 16.

20. An isolated antibody which specifically binds to a protein of claim 16.

21. The antibody of claim 20, wherein the antibody is selected from a polyclonal antibody, a monoclonal antibody, a chimeric antibody, a recombinant antibody, a humanized antibody, a single chain antibody, a Fab fragment, an F(ab′)₂ fragment, an Fv fragment; and an antibody-peptide fusion protein.

22. A method of using a protein to prepare and purify a polyclonal antibody comprising:
a) immunizing a animal with a protein of claim 16 under conditions to elicit an antibody response;
b) isolating animal antibodies;
c) attaching the protein to a substrate;
d) contacting the substrate with isolated antibodies under conditions to allow specific binding to the protein;
e) dissociating the antibodies from the protein, thereby obtaining purified polyclonal antibodies.

23. A polyclonal antibody produced by the method of claim 22.

24. A method of using a protein to prepare a monoclonal antibody comprising:
a) immunizing a animal with a protein of claim 16 under conditions to elicit an antibody response;
b) isolating antibody-producing cells from the animal;
c) fusing the antibody-producing cells with immortalized cells in culture to form monoclonal antibody producing hybridoma cells;
d) culturing the hybridoma cells; and
e) isolating monoclonal antibodies from culture.

25. A monoclonal antibody produced by the method of claim 24.

26. A method for using an antibody to detect expression of a protein in a sample, the method comprising:
a) combining the antibody of claim 20 with a sample under conditions which allow the formation of antibody:protein complexes; and
b) detecting complex formation, wherein complex formation indicates expression of the protein in the sample.

27. The method of claim 26 wherein complex formation is compared with standards and is diagnostic of a lung cancer.

28. A composition comprising an antibody of claim 20 and a labeling moiety or a pharmaceutical agent..

The application's sequence listing, which the Patent Office published only in electronic form, follows.

SEQUENCE LISTING (519 sequences)

SEQ ID NO: 1 - DNA, 5037 bp, Homo sapiens
  misc_feature: Incyte ID No: 1867417CB1
gcgtctgtggagaagcggcttggtcgggggtggtctcgtggggtcctgcctgtttagtcgctttcagggttcttgagccccttcacgaccgtcaccatggaagtgtcaccattgcagcctgtaaatgaaaatatgcaagtcaacaaaataaagaaaaatgaagatgctaagaaaagactgtctgttgaaagaatctatcaaaagaaaacacaattggaacatattttgctccgcccagacacctacattggttctgtggaattagtgacccagcaaatgtgggtttacgatgaagatgttggcattaactatagggaagtcacttttgttcctggtttgtacaaaatctttgatgagattctagttaatgctgcggacaacaaacaaagggacccaaaaatgtcttgtattagagtcacaattgatccggaaaacaatttaattagtatatggaataatggaaaaggtattcctgttgttgaacacaaagttgaaaagatgtatgtcccagctctcatatttggacagctcctaacttctagtaactatgatgatgatgaaaagaaagtgacaggtggtcgaaatggctatggagccaaattgtgtaacatattcagtaccaaatttactgtggaaacagccagtagagaatacaagaaaatgttcaaacagacatggatggataatatgggaagagctggtgagatggaactcaagcccttcaatggagaagattatacatgtatcacctttcagcctgatttgtctaagtttaaaatgcaaagcctggacaaagatattgttgcactaatggtcagaagagcatatgatattgctggatccaccaaagatgtcaaagtctttcttaatggaaataaactgccagtaaaaggatttcgtagttatgtggacatgtatttgaaggacaagttggatgaaactggtaactccttgaaagtaatacatgaacaagtaaaccacaggtgggaagtgtgtttaactatgagtgaaaaaggctttcagcaaattagctttgtcaacagcattgctacatccaagggtggcagacatgttgattatgtagctgatcagattgtgactaaacttgttgatgttgtgaagaagaagaacaagggtggtgttgcagtaaaagcacatcaggtgaaaaatcacatgtggatttttgtaaatgccttaattgaaaacccaacctttgactctcagacaaaagaaaacatgactttacaacccaagagctttggatcaacatgccaattgagtgaaaaatttatcaaagctgccattggctgtggtattgtagaaagcatactaaactgggtgaagtttaaggcccaagtccagttaaacaagaagtgttcagctgtaaaacataatagaatcaagggaattcccaaactcgatgatgccaatgatgcagggggccgaaactccactgagtgtacgcttatcctgactgagggagattcagccaaaactttggctgtttcaggccttggtgtggttgggagagacaaatatggggttttccctcttagaggaaaaatactcaatgttcgagaagcttctcataagcagatcatggaaaatgctgagattaacaatatcatcaagattgtgggtcttcagtacaagaaaaactatgaagatgaagattcattgaagacgcttcgttatgggaagataatgattatgacagatcaggaccaagatggttcccacatcaaaggcttgctgattaattttatccatcacaactggccctctcttctgcgacatcgttttctggaggaatttatcactcccattgtaaaggtatctaaaaacaagcaagaaatggcattttacagccttcctgaatttgaagagtggaagagttctactccaaatcataaaaaatggaaagtcaaatattacaaaggtttgggcaccagcacatcaaaggaagctaaagaatactttgcagatatgaaaagacatcgtatccagttcaaatattctggtcctgaagatgatgctgctatcagcctggcctttagcaaaaaacagatagatgatcgaaaggaatggttaactaatttcatggaggatagaagacaacgaaagttacttgggcttcctgaggattacttgtatggacaaactaccacatatctgacatataatgacttcatcaacaaggaacttatcttgttctcaaattctgataacgagagatctatcccttctatggtggatggtttgaaaccaggtcagagaaaggttttgtttacttgcttcaaacggaatgacaagcgagaagtaaaggttgcccaattagctggatcagtggctgaaatgtcttcttatcatcatggtgagatgtcactaatgatgaccattatcaatttggctcagaattttgtgggtagcaataatctaaacctcttgcagcccattggtcagtttggtaccaggctacatggtggcaaggattctgctagtccacgatacatctttacaatgctcagctctttggctcgattgttatttccaccaaaagatgatcacacgttgaagtttttatatgatgacaaccagcgtgttgagcctgaatggtacattcctattattcccatggtgctgataaatggtgctgaaggaatcggtactgggtggtcctgcaaaatccccaactttgatgtgcgtgaaattgtaaataacatcaggcgtttgatggatggagaagaacctttgccaatgcttccaagttacaagaacttcaagggtactattgaagaactggctccaaatcaatatgtgattagtggtgaagtagctattcttaattctacaaccattgaaatctcagagcttcccgtcagaacatggacccagacatacaaagaacaagttctagaacccatgttgaatggcaccgagaagacacctcctctcataacagactatagggaataccatacagataccactgtgaaatttgttgtgaagatgactgaagaaaaactggcagaggcagagagagttggactacacaaagtcttcaaactccaaactagtctcacatgcaactctatggtgctttttgaccacgtaggctgtttaaagaaatatgacacggtgttggatattctaagagacttttttgaactcagacttaaatattatggattaagaaaagaatggctcctaggaatgcttggtgctgaatctgctaaactgaataatcaggctcgctttatcttagagaaaatagatggcaaaataatcattgaaaataagcctaagaaagaattaattaaagttctgattcagaggggatatgattcggatcctgtgaaggcctggaaagaagcccagcaaaaggttccagatgaagaagaaaatgaagagagtgacaacgaaaaggaaactgaaaagagtgactccgtaacagattctggaccaaccttcaactatcttcttgatatgcccctttggtatttaaccaaggaaaagaaagatgaactctgcaggctaagaaatgaaaaagaacaagagctggacacattaaaaagaaagagtccatcagatttgtggaaagaagacttggctacatttattgaagaattggaggctgttgaagccaaggaaaaacaagatgaacaagtcggacttcctgggaaaggggggaaggccaaggggaaaaaaacacaaatggctgaagttttgccttctccgcgtggtcaaagagtcattccacgaataaccatagaaatgaaagcagaggcagaaaagaaaaataaaaagaaaattaagaatgaaaatactgaaggaagccctcaagaagatggtgtggaactagaaggcctaaaacaaagattagaaaagaaacagaaaagagaaccaggtacaaagacaaagaaacaaactacattggcatttaagccaatcaaaaaaggaaagaagagaaatccctggtctgattcagaatcagataggagcagtgacgaaagtaattttgatgtccctccacgagaaacagagccacggagagcagcaacaaaaacaaaattcacaatggatttggattcagatgaagatttctcagattttgatgaaaaaactgatgatgaagattttgtcccatcagatgctagtccacctaagaccaaaacttccccaaaacttagtaacaaagaactgaaaccacagaaaagtgtcgtgtcagaccttgaagctgatgatgttaagggcagtgtaccactgtcttcaagccctcctgctacacatttcccagatgaaactgaaattacaaacccagttcctaaaaagaatgtgacagtgaagaagacagcagcaaaaagtcagtcttccacctccactaccggtgccaaaaaaagggctgccccaaaaggaactaaaagggatccagctttgaattctggtgtctctcaaaagcctgatcctgccaaaaccaagaatcgccgcaaaaggaagccatccacttctgatgattctgactctaattttgagaaaattgtttcgaaagcagtcacaagcaagaaatccaagggggagagtgatgacttccatatggactttgactcagctgtggctcctcgggcaaaatctgtacgggcaaagaaacctataaagtacctggaagagtcagatgaagatgatctgttttaaaatgtgaggcgattattttaagtaattatcttaccaagcccaagactggttttaaagttacctgaagctcttaacttcctcccctctgaatttagtttggggaaggtgtttttagtacaagacatcaaagtgaagtaaagcccaagtgttctttagctttttataatactgtctaaatagtgaccatctcatgggcattgttttcttctctgctttgtctgtgttttgagtctgctttcttttgtctttaaaacctgatttttaagttcttctgaactgtagaaatagctatctgatcacttcagcgtaaagcagtgtgtttattaaccatccactaagctaaaa

SEQ ID NO: 2 - DNA, 2858 bp, Homo sapiens
  misc_feature: Incyte ID No: 1970111CB1
ccgcttcggagtcggcggtggtcgtccagaccgagtgttctttactttttgtttggttgaggtttcacgctagaaggtggctcaggatgtcttcatcacattttgccagtcgacacaggaaggatataagtactgaaatgattagaactaaaattgctcataggaaatcactgtctcagaaagaaaatagacataaggaatacgaacgaaatagacactttggtttgaaagatgtaaacattccaaccttggaaggtagaattcttgttgaattagatgagacatctcaagggcttgttccagaaaagaccaatgttaagccaagggcaatgaaaactattctaggtgatcaacgaaaacagatgctccaaaaatacaaagaagaaaagcaacttcaaaaattgaaagagcagagagagaaagctaaacgaggaatatttaaagtgggtcgttatagacctgatatgccttgttttcttttatcaaaccagaatgctgtgaaagctgagccaaaaaaggctattccatcttctgtacggattacaaggtcaaaggccaaagaccaaatggagcagactaagattgataacgagagtgatgttcgagcaatccgacctggtccaagacaaacttctgaaaagaaagtgtcagacaaagagaaaaaagttgtgcagcctgtaatgcccacgtcgttgagaatgactcgatcagctactcaagcagcaaagcaggttcccagaacagtctcatctaccacagcaagaaagccagtcacaagagctgctaatgaaaacgaaccagaaggaaaggtgccaagtaaaggaagacctgccaaaaatgtagaaacaaaacccgacaagggtatttcttgtaaagtcgatagtgaagaaaatactttgaattcacaaactaatgcaacaagtggaatgaatccagatggagtcttatcaaaaatggaaaacttacctgagataaatactgcaaaaataaaagggaagaattccttcgcacctaaggattttatgtttcagccactggatggtctgaagacctatcaagtaacacctatgactcccagaagtgccaatgcttttttgacacccagttacacctggactcctttaaaaacagaagttgatgagtctcaagcaacaaaagaaattttggcacaaaaatgtaaaacttactctaccaagacaatacagcaagattcaaataaattgccatgtcctttgggtcctctaactgtttggcatgaagaacatgttttaaataaaaatgaagctactactaaaaatttaaatggccttccaataaaagaagtcccatcacttgaaagaaatgaaggtcgaattgctcagccccaccatggtgtgccatatttcagaaatatcctccagtcagaaactgagaaattaacttcacattgcttcgagtgggacaggaaacttgaattggacattccagatgatgctaaagatcttattcgcacagcagttggtcaaacaagactccttatgaaggaaaggtttaaacagtttgaaggactggttgatgattgtgaatataaacgaggtataaaggagactacctgtacagatctggatggattttgggatatggttagttttcagatagaagatgtaatccacaaattcaacaatctgatcaaacttgaggaatctgggtggcaagtcaataataatatgaatcataatatgaacaaaaatgtctttaggaaaaaagttgtctcaggtatagcaagtaaaccaaaacaggatgatgctggaagaattgcagcgagaaatcgcctagctgccataaaaaatgcaatgagagagagaattaggcaggaagaatgtgctgaaacagcagtttctgtgataccaaaggaagttgataaaatagtgttcgatgctggatttttcagagttgaaagtcctgttaaattattctcaggactttctgtctcttctgaaggcccttctcaaagacttggaacacctaagtctgtcaacaaagctgtatctcagagtagaaatgagatgggcattccacaacaaactacatcaccagaaaatgccggtcctcagaatacgaaaagtgaacatgtgaagaagactttgtttttgagtattcctgaaagcaggagcagcatagaagatgctcagtgtcctggattaccagatttaattgaagaaaatcatgttgtaaataagacagacttgaaggtggattgtttatccagtgagagaatgagtttgcctcttcttgctggtggagtagcagatgatattaatactaacaaaaaagaaggaatttcagatgttgtggaaggaatggaactgaattcttcaattacatcacaggatgttttgatgagtagccctgaaaaaaatacagcttcacaaaatagcatcttagaagaaggggaaactaaaatttctcagtcagaactatttgataataaaagtctcactactgaatgccaccttcttgattcaccaggtctaaactgcagtaatccatttactcagctggagaggagacatcaagaacatgccagacacatttcttttggtggtaacctgattactttttcacctctacaaccaggagaattttgaatttaaaaataaatccaaacattttccttcatattatcaatgcttatatattccttagactattgaaattttggagaaaatgtatttgtgttcacttctatagcatataatgttttaatattctgtgttcatcaaagtgtattttagatatactctttctcaagggaagtggggatattttgtacattttcaacacagaataaaaaatgtactgtgaaaaaaaaaaaaaaa

SEQ ID NO: 3 - DNA, 5696 bp, Homo sapiens
  misc_feature: Incyte ID No: 959142CB1
gactacgctgcactgcagggccggtctctcgctccagcagagcctgcgcctttctgactcggtccggaacactgaaaccagtcatcactgcatctttttggcaaaccaggagctcagctgcaggaggcaggatggtctggaggctggtcctgctggctctgtgggtgtggcccagcacgcaagctggtcaccaggacaaagacacgaccttcgaccttttcagtatcagcaacatcaaccgcaagaccattggcgccaagcagttccgcgggcccgaccccggcgtgccggcttaccgcttcgtgcgctttgactacatcccaccggtgaacgcagatgacctcagcaagatcaccaagatcatgcggcagaaggagggcttcttcctcacggcccagctcaagcaggacggcaagtccaggggcacgctgttggctctggagggccccggtctctcccagaggcagttcgagatcgtctccaacggccccgcggacacgctggatctcacctactggattgacggcacccggcatgtggtctccctggaggacgtcggcctggctgactcgcagtggaagaacgtcaccgtgcaggtggctggcgagacctacagcttgcacgtgggctgcgacctcatagacagcttcgctctggacgagcccttctacgagcacctgcaggcggaaaagagccggatgtacgtggccaaaggctctgccagagagagtcacttcaggggtttgcttcagaacgtccacctagtgtttgaaaactctgtggaagatattctaagcaagaagggttgccagcaaggccagggagctgagatcaacgccatcagtgagaacacagagacgctgcgcctgggtccgcatgtcaccaccgagtacgtgggccccagctcagagaggaggcccgaggtgtgcgaacgctcgtgcgaggagctgggaaacatggtccaggagctctcggggctccacgtcctcgtgaaccagctcagcgagaacctcaagagagtgtcgaatgataaccagtttctctgggagctcattggtggccctcctaagacaaggaacatgtcagcttgctggcaggatggccggttctttgcggaaaatgaaacgtgggtggtggacagctgcaccacgtgtacctgcaagaaatttaaaaccatttgccaccaaatcacctgcccgcctgcaacctgcgccagtccatcctttgtggaaggcgaatgctgcccttcctgcctccactcggtggacggtgaggagggctggtctccgtgggcagagtggacccagtgctccgtgacgtgtggctctgggacccagcagagaggccggtcctgtgacgtcaccagcaacacctgcttggggccctccatccagacacgggcttgcagtctgagcaagtgtgacacccgcatccggcaggacggcggctggagccactggtcaccttggtcttcatgctctgtgacctgtggagttggcaatatcacacgcatccgtctctgcaactccccagtgccccagatggggggcaagaattgcaaagggagtggccgggagaccaaagcctgccagggcgccccatgcccaatcgatggccgctggagcccctggtccccgtggtcggcctgcactgtcacctgtgccggtgggatccgggagcgcacccgggtctgcaacagccctgagcctcagtacggagggaaggcctgcgtgggggatgtgcaggagcgtcagatgtgcaacaagaggagctgccccgtggatggctgtttatccaacccctgcttcccgggagcccagtgcagcagcttccccgatgggtcctggtcatgcggctcctgccctgtgggcttcttgggcaatggcacccactgtgaggacctggacgagtgtgccctggtccccgacatctgcttctccaccagcaaggtgcctcgctgtgtcaacactcagcctggcttccactgcctgccctgcccgccccgatacagagggaaccagcccgtcggggtcggcctggaagcagccaagacggaaaagcaagtgtgtgagcccgaaaacccatgcaaggacaagacacacaactgccacaagcacgcggagtgcatctacctgggccacttcagcgaccccatgtacaagtgcgagtgccagacaggctacgcgggcgacgggctcatctgcggggaggactcggacctggacggctggcccaacctcaatctggtctgcgccaccaacgccacctaccactgcatcaaggataactgcccccatctgccaaattctgggcaggaagactttgacaaggacgggattggcgatgcctgtgatgatgacgatgacaatgacggtgtgaccgatgagaaggacaactgccagctcctcttcaatccccgccaggctgactatgacaaggatgaggttggggaccgctgtgacaactgcccttacgtgcacaaccctgcccagatcgacacagacaacaatggagagggtgacgcctgctccgtggacattgatggggacgatgtcttcaatgaacgagacaattgtccctacgtctacaacactgaccagagggacacggatggtgacggtgtgggggatcactgtgacaactgccccctggtgcacaaccctgaccagaccgacgtggacaatgaccttgttggggaccagtgtgacaacaacgaggacatagatgacgacggccaccagaacaaccaggacaactgcccctacatctccaacgccaaccaggctgaccatgacagagacggccagggcgacgcctgtgaccctgatgatgacaacgatggcgtccccgatgacagggacaactgccggcttgtgttcaacccagaccaggaggacttggacggtgatggacggggtgatatttgtaaagatgattttgacaatgacaacatcccagatattgatgatgtgtgtcctgaaaacaatgccatcagtgagacagacttcaggaacttccagatggtccccttggatcccaaagggaccacccaaattgatcccaactgggtcattcgccatcaaggcaaggagctggttcagacagccaactcggaccccggcatcgctgtaggttttgacgagtttgggtctgtggacttcagtggcacattctacgtaaacactgaccgggacgacgactatgccggcttcgtctttggttaccagtcaagcagccgcttctatgtggtgatgtggaagcaggtgacgcagacctactgggaggaccagcccacgcgggcctatggctactccggcgtgtccctcaaggtggtgaactccaccacggggacgggcgagcacctgaggaacgcgctgtggcacacggggaacacgccggggcaggtgcgaaccttatggcacgaccccaggaacattggctggaaggactacacggcctataggtggcacctgactcacaggcccaagactggctacatcagagtcttagtgcatgaaggaaaacaggtcatggcagactcaggacctatctatgaccaaacctacgctggcgggcggctgggtctatttgtcttctctcaagaaatggtctatttctcagacctcaagtacgaatgcagagatatttaaacaagatttgctgcatttccggcaatgccctgtgcatgccatggtccctagacacctcagttcattgtggtccttgtggcttctctctctagcagcacctcctgtcccttgaccttaactctgatggttcttcacctcctgccagcaaccccaaacccaagtgccttcagaggataaatatcaatggaacgcagagatgaacatctaacccactagaggaaaccagtttggtgatatatgagactttatgtggagtgaaaattgggcatgccattacattgctttttcttgtttgtttaaaaagaatgacgtttacatataaaatgtaattacttattgtatttatgtgtatatggagttgaagggaatactgtgcataagccattatgataaattaagcatgaaaaatattgctgaactacttttggtgcttaaagttgtcactattcttgaattagagttgctctacaatgacacacaaatcccgctaaataaattataaacaagggtcaattcaaatttgaagtaatgttttagtaaggagagattagaagacaacaggcatagcaaatgacataagctaccgattaactaatcggaacatgtaaaacagttacaaaaataaacgaactctcctcttgtcctacaatgaaagccctcatgtgcagtagagatgcagtttcatcaaagaacaaacatccttgcaaatgggtgtgatgcggttccagatgtggatttggcaaaacctcatttaagtaaaaggttagcagagcaaagtgcggtgctttagctgctgcttgtgccgctgtggtgtcggggaggctcctgcctgagcttccttccccagctttgctgcctgagaggaaccagagcagacgcacaggccggaaaaggcgcatctaacgcgtatctaggctttggtaactgcggacaagttgcttttacctgatttgatgatacatttcattaaggttccagttataaatattttgttaatatttattaagtgactatagaatgcaactccatttaccagtaacttattttaaatatgcctagtaacacatatgtagtataatttctagaaacaaacatctaataagtatataatcctgtgaaaatatgaggcttgataatattaggttgtcacgatgaagcatgctagaagctgtaacagaatacatagagaataatgaggagtttatgatggaaccttaaatatataatgttgccagcgattttagttcaatatttgttactgttatctatctgctgtatatggaattcttttaattcaaacgctgaaaagaatcagcatttagtcttgccaggcacacccaataatcagtcatgtgtaatatgcacaagtttgtttttgtttttgttttttttgttggttggtttgtttttttgctttaagttgcatgatctttctgcaggaaatagtcactcatcccactccacataaggggtttagtaagagaagtctgtctgtctgatgatggatagggggcaaatctttttcccctttctgttaatagtcatcacatttctatgccaaacaggaacaatccataactttagtcttaatgtacacattgcattttgataaaattaattttgttgtttcctttgaggttgatcgttgtgttgttgttttgctgcactttttacttttttgcgtgtggagctgtattcccgagaccaacgaagcgttgggatacttcattaaatgtagcgactgtcaacagcgtgcaggttttctgtttctgtgttgtggggtcaaccgtacaatggtgtgggagtgacgatgatgtgaatatttagaatgtaccatattttttgtaaattatttatgtttttctaaacaaatttatcgtataggttgatgaaacgtcatgtgttttgccaaagactgtaaatatttatttatgtgttcacatggtcaaaatttcaccactgaaaccctgcacttagctagaacctcatttttaaagattaacaacaggaaataaattgtaaaaaaggttttctaaaaaaaaaaaa

SEQ ID NO: 4 - DNA, 657 bp, Homo sapiens
  misc_feature: Incyte ID No: 064684.7
cgggtgtcggggccagggtgagacgggacaccctgacagagcagctgcgctggctcactgtcttccagcaggcaggagacatcacgtcacccaccagcctgggcccggctggggagggggtggcaggggccctggttttgtgcggcgctcctcctcccgcagccacagccgcgtgcgtgccattgccagccgggcccgccaggcccaggagcggcagcagagactgcagggcctgggccggcagggacccccagaagaggagcggggcacccccgagggcgcctgctccgtgggccacgagggcagtgtggatgcaccagcaccctccaagggagccctcgggccagcatccgcggctgctgaaaacctggtcctgctccgcctctgaccgtcagtggtgggaacctgggcggctctggaggcccagggcaggggtgggcgtgttgtttgccctgtgtcccctccgcccctgcctccctcctgcccctgctcccggggaggaaaggctaaagctgctggcccggggcccacaggaggggcttcgaggctggccctgccaggcagttttcccggcgttttaggatctgtacatagagaaatatttaaatttttagaagcaaaacttatacaacattaaaatgataccaagtccctttc

SEQ ID NO: 5 - DNA, 6022 bp, Homo sapiens
  misc_feature: Incyte ID No: 245093.34
tcggggactaactgcacggagagactcaagatgattccctttttacccatgttttctctactattgctgcttattgttaaccctataaacgccaacaatcattatgacaagatcttggctcatagtcgtatcaggggtcgggaccaaggcccaaatgtctgtgcccttcaacagattttgggcaccaaaaagaaatacttcagcacttgtaagaactggtataaaaagtccatctgtggacagaaaacgactgtgttatatgaatgttgccctggttatatgagaatggaaggaatgaaaggctgcccagcagttttgcccattgaccatgtttatggcactctgggcatcgtgggagccaccacaacgcagcgctattctgacgcctcaaaactgagggaggagatcgagggaaagggatccttcacttactttgcaccgagtaatgaggcttgggacaacttggattctgatatccgtagaggtttggagagcaacgtgaatgttgaattactgaatgctttacatagtcacatgattaataagagaatgttgaccaaggacttaaaaaatggcatgattattccttcaatgtataacaatttggggcttttcattaaccattatcctaatggggttgtcactgttaattgtgctcgaatcatccatgggaaccagattgcaacaaatggtgttgtccatgtcattgaccgtgtgcttacacaaattggtacctcaattcaagacttcattgaagcagaagatgacctttcatcttttagagcagctgccatcacatcggacatattggaggcccttggaagagacggtcacttcacactctttgctcccaccaatgaggcttttgagaaacttccacgaggtgtcctagaaaggatcatgggagacaaagtggcttccgaagctcttatgaagtaccacatcttaaatactctccagtgttctgagtctattatgggaggagcagtctttgagacgctggaaggaaatacaattgagataggatgtgacggtgacagtataacagtaaatggaatcaaaatggtgaacaaaaaggatattgtgacaaataatggtgtgatccatttgattgatcaggtcctaattcctgattctgccaaacaagttattgagctggctggaaaacagcaaaccaccttcacggatcttgtggcccaattaggcttggcatctgctctgaggccagatggagaatacactttgctggcacctgtgaataatgcattttctgatgatactctcagcatggatcagcgcctccttaaattaattctgcagaatcacatattgaaagtaaaagttggccttaatgagctttacaacgggcaaatactggaaaccatcggaggcaaacagctcagagtcttcgtatatcgtacagctgtctgcattgaaaattcatgcatggagaaagggagtaagcaagggagaaacggtgcgattcacatattccgcgagatcatcaagccagcagagaaatccctccatgaaaagttaaaacaagataagcgctttagcaccttcctcagcctacttgaagctgcagacttgaaagagctcctgacacaacctggagactggacattatttgtgccaaccaatgatgcttttaagggaatgactagtgaagaaaaagaaattctgatacgggacaaaaatgctcttcaaaacatcattctttatcacctgacaccaggagttttcattggaaaaggatttgaacctggtgttactaacattttaaagaccacacaaggaagcaaaatctttctgaaagaagtaaatgatacacttctggtgaatgaattgaaatcaaaagaatctgacatcatgacaacaaatggtgtaattcatgttgtagataaactcctctatccagcagacacacctgttggaaatgatcaactgctggaaatacttaataaattaatcaaatacatccaaattaagtttgttcgtggtagcaccttcaaagaaatccccgtgactgtctatagacccacactaacaaaagtcaaaattgaaggtgaacctgaattcagactgattaaagaaggtgaaacaataactgaagtgatccatggagagccaattattaaaaaatacaccaaaatcattgatggagtgcctgtggaaataactgaaaaagagacacgagaagaacgaatcattacaggtcctgaaataaaatacactaggatttctactggaggtggagaaacagaagaaactctgaagaaattgttacaagaagacacacccgtgaggaagttgcaagccaacaaaaaagttcaaggatctagaagacgattaagggaaggtcgttctcagtgaaaatccaaaaaccagaaaaaaatgtttatacaaccctaagtcaataacctgaccttagaaaattgtgagagccaagttgacttcaggaactgaaacatcagcacaaagaagcaatcatcaaataattctgaacacaaatttaatatttttttttctgaatgagaaacatgagggaaattgtggagttagcctcctgtggtaaaggaattgaagaaaatataacaccttacaccctttttcatcttgacattaaaagttctggctaactttggaatccattagagaaaaatccttgtcaccagattcattacaattcaaatcgaagagttgtgaactgttatcccattgaaaagaccgagccttgtatgtatgttatggatacataaaatgcacgcaagccattatctctccatgggaagctaagttataaaaataggtgcttggtgtacaaaactttttatatcaaaaggctttgcacatttctatatgagtgggtttactggtaaattatgttattttttacaactaattttgtactctcagaatgtttgtcatatgcttcttgcaatgcatattttttaatctcaaacgtttcaataaaaccatttttctgaattactcaaattgaagtaattctctttatatctgaaaaatggttttattgaaacgtttgagattaaaaaatatgcattgcaagaagcatatgacaaacattctgagagtacaaaattagttgtaaaaaataacataatttaccagtaaacccactcatatagaaatgtgcaaagccttttgatataaaaagttttgtacaccaagcacctatttttataacttagcttcccatggagagataatggcttgcgtgcattttatgtatccataacatacatacaaggctcggtcttttcaatgggataacagttcacaactcttcgatttgaattgtaatgaatctggtgacaaggatttttctctaatggattccaaagttagccagaacttttaatgtcaagatgaaaaagggtgtaaggtgttatattttcttcaattcctttaccacaggaggctaactccacaggaggctaactcccacaatttccctcatgtttctcattcagaaaaaaaaatattaaatttgtgttcagaattatttgatgattgcttctttgtgctgatgtttcagttcctgaagtcaacttggctctcacaattttctaaggtcaggttattgacttagggttgtataaacatttttttctggtttttggattttcactgagaacgaccttcccttaatcgtcttctagatccttgaacttttttgttggcttgcaacttcctcacgggtgtgtctccctgaagcagtcttttaatttcttcatcttcaaataaagaccatcaccaccttcaatggaatttggtgaccttggtgacctcttcttgtaacaatttcttcagagtttcttctgtttctccacctccagtaggaaatcctagtgtattttatttcaggacctgtaatgattcgttcttctcgtgtctctttttcagttatttccacaggcactccatcaatgattttggtgtattttttaataattggcttatagacagtcacggggatttctttgaaggtgctaccacgaacaaacttaatttggatgtatttgattaatttattaagtatttccagcagttgatcatttccaacaggtgtgtctgctggatagaggagtttatctacaacatgaattacaccatttgttgtcatgatgtcagattcttttgatttcaattcattcaccagaagtgtatcatttacttctttcagaaagattttgcttccttgtgtggtctttaaaatgttagtaacaccaggttcaaatccttttccaatgaaaactcctggtgtcaggtgataaagaatgatgttttgaagagcatttttgtcccgtatcagaatttctttttcttcactagtcattcccttaaaagcatcattggttggcacaaataatgtccagtctccaggttgtgtcaggagctctttcaagtctgcagcttcaagtaggctgaggaaggtgctaaagcgcttatcttgttttaacttttcatggagggatttctctgctggcttgatgatctcgcggaatatgtgaatcgcaccgtttctcccttgcttactccctttctccatgcatgaattttcaatgcagacagctgtacgatatacgaagactctgagctgtttgcctccgatggtttccagtatttgcccgttgtaaagctcattaaggccaacttttactttcaatatgtgattctgcagaattaatttaaggaggcgctgaaccatgctgagagtatcatcagaaaatgcattattcacaggtgccagcaaagtgtattctccatctggcctcagagcagatgccaagcctaattgggccacaagatccgtgaaggtggtttgctgttttccagccagctcaataacttgtttggcagaatcaggaattaggacctgatcaatcaaatggatcacaccattatttgtcacaatatcctttttgttcaccattttgattccatttactgttatactgtcaccgtcacatcctatctcaattgtatttccttccagcgtctcaaagactgctcctcccataatagactcagaacactggagagtatttaagatgtggtacttcataagagcttcggaagccactttgtctcccatgaacctttctaggacacctcgtggaagtttctcaaaagcctcattggtgggagcaaagagtgtgaagtgaccgtctcttccaagggcctccaatatgtccgatgtgatggcagctgctctaaaagatgaaaggtcatcttctgcttcaatgaagtcttgaattgaggtaccaatttgtgtaagcacacggtcaatgacatggacaacaccatttgttgcaatctggttcccatggatgattcgagcacaattaacagtgacaaccccattaggataatggttaatgaaaagccccaaattgttatacattgaaggaataatcatgccattttttaagtccttggtcaacattctcttattaatcatgtgactatgtaaagcattcagtaattcaacattcacgttgctctccaaacctctacggatatcagaatccaagttgtcccaagcctcattactcggtgcaaagtaagtgaaggatccctttccctcgatctcctccctcagttttgaggcgtcagaatagcgctgcgttgtggtggctcccacgatgcccagagtgccataaacatggtcaatgggcaaaactgctgggcagcctttcattccttccattctcatataaccagggcaacattcatataacacagtcgttttctgtccacagatggactttttataccagttcttacaagtgctgaagtatttctttttggtgcccaaaatctgttgaagggcacagacatttgggccttggtcccgacccctgatacgactatgagccaagatcttgtcataatgattgttggcgtttatagggttaacaataagcagcaatagtagagaaaacatgggtaaaaagggaatcatcttgagtctctccgttgcagttagtccccg

SEQ ID NO: 6 - DNA, 3777 bp, Homo sapiens
  misc_feature: Incyte ID No: 331908.5
gttgtatccaattcagaaacgcggtccttcgggacctgctagttttataccccggaggatcctccccggcgggctggcacgggaggtggagaaagaggcttgggcggccccgctgtagccgcgtgtgggaggacgcacgggcctgcttcaaagctttgggataacagcgcctccgggggataatgaatgcggagcctccgttttcagtcgacttcagatgtgtctccacttttttccgctgtagccgcaaggcaaggaaacatttctcttcccgtactgaggaggctgaggagtgcactgggtgttcttttctcctctaacccagaactgcgagacagaggctgagtccctgtaaagaacagctccagaaaagccaggagagcgcaggagggcatccgggaggccaggaggggttcgctggggcctcaaccgcacccacatcggtcccacctgcgagggggcgggacctcgtggcgctggaccaatcagcacccacctgcgctcacctggcctcctcccgctggctcccgggggctgcggtgctcaaaggggcaagagctgagcggaacaccggcccgccgtcgcggcagctgcttcacccctctctctgcagccatggggctccctcgtggacctctcgcgtctctcctccttctccaggtttgctggctgcagtgcgcggcctccgagccgtgccgggcggtcttcagggaggctgaagtgaccttggaggcgggaggcgcggagcaggagcccggccaggcgctggggaaagtattcatgggctgccctgggcaagagccagctctgtttagcactgataatgatgacttcactgtgcggaatggcgagacagtccaggaaagaaggtcactgaaggaaaggaatccattgaagatcttcccatccaaacgtatcttacgaagacacaagagagattgggtggttgctccaatatctgtccctgaaaatggcaagggtcccttcccccagagactgaatcagctcaagtctaataaagatagagacaccaagattttctacagcatcacggggccgggggcagacagcccccctgagggtgtcttcgctgtagagaaggagacaggctggttgttgttgaataagccactggaccgggaggagattgccaagtatgagctctttggccacgctgtgtcagagaatggtgcctcagtggaggaccccatgaacatctccatcatcgtgaccgaccagaatgaccacaagcccaagtttacccaggacaccttccgagggagtgtcttagagggagtcctaccaggtacttctgtgatgcaggtgacagccacagatgaggatgatgccatctacacctacaatggggtggttgcttactccatccatagccaagaaccaaaggacccacacgacctcatgttcaccattcaccggagcacaggcaccatcagcgtcatctccagtggcctggaccgggaaaaagtccctgagtacacactgaccatccaggccacagacatggatggggacggctccaccaccacggcagtggcagtagtggagatccttgatgccaatgacaatgctcccatgtttgacccccagaagtacgaggcccatgtgcctgagaatgcagtgggccatgaggtgcagaggctgacggtcactgatctggacgcccccaactcaccagcgtggcgtgccacctaccttatcatgggcggtgacgacggggaccattttaccatcaccacccaccctgagagcaaccagggcatcctgacaaccaggaagggtttggattttgaggccaaaaaccagcacaccctgtacgttgaagtgaccaacgaggccccttttgtgctgaagctcccaacctccacagccaccatagtggtccacgtggaggatgtgaatgaggcacctgtgtttgtcccaccctccaaagtcgttgaggtccaggagggcatccccactggggagcctgtgtgtgtctacactgcagaagaccctgacaaggagaatcaaaagatcagctaccgcatcctgagagacccagcagggtggctagccatggacccagacagtgggcaggtcacagctgtgggcaccctcgaccgtgaggatgagcagtttgtgaggaacaacatctatgaagtcatggtcttggccatggacaatggaagccctcccaccactggcacgggaacccttctgctaacactgattgatgtcaacgaccatggcccagtccctgagccccgtcagatcaccatctgcaaccaaagccctgtgcgccacgtgctgaacatcacggacaaggacctgtctccccacacctcccctttccaggcccagctcacagatgactcagacatctactggacggcagaggtcaacgaggaaggtgacacagtggtcttgtccctgaagaagttcctgaagcaggatacatatgacgtgcacctttctctgtctgaccatggcaacaaagagcagctgacggtgatcagggccactgtgtgcgactgccatggccatgtcgaaacctgccctggaccctggaagggaggtttcatcctccctgtgctgggggctgtcctggctctgctgttcctcctgctggtgctgcttttgttggtgagaaagaagcggaagatcaaggagcccctcctactcccagaagatgacacccgtgacaacgtcttctactatggcgaagaggggggtggcgaagaggaccaggactatgacatcacccagctccaccgaggtctggaggccaggccggaggtggttctccgcaatgacgtggcaccaaccatcatcccgacacccatgtaccgtcctaggccagccaacccagatgaaatcggcaactttataattgagaacctgaaggcggctaacacagaccccacagccccgccctacgacaccctcttggtgttcgactatgagggcagcggctccgacgccgcgtccctgagctccctcacctcctccgcctccgaccaagaccaagattacgattatctgaacgagtggggcagccgcttcaagaagctggcagacatgtacggtggcggggaggacgactaggcggcctgcctgcagggctggggaccaaacgtcaggccacagagcatctccaaggggtctcagttcccccttcagctgaggacttcggagcttgtcaggaagtggccgtagcaacttggcggagacaggctatgagtctgacgttagagtggttgcttccttagcctttcaggatggaggaatgtgggcagtttgacttcagcactgaaaacctctccacctgggccagggttgcctcagaggccaagtttccagaagcctcttacctgccgtaaaatgctcaaccctgtgtcctgggcctgggcctgctgtgactgacctacagtggactttctctctggaatggaaccttcttaggcctcctggtgcaacttaatttttttttttaatgctatcttcaaaacgttagagaaagttcttcaaaagtgcagcccagagctgctgggcccactggccgtcctgcatttctggtttccagaccccaatgcctcccattcggatggatctctgcgtttttatactgagtgtgcctaggttgccccttattttttattttccctgttgcgttgctatagatgaagggtgaggacaatcgtgtatatgtactagaacttttttattaaagaaacttttcccagaggtgcctggggagtgaactgttttctaaaaaaa

SEQ ID NO: 7 - DNA, 5615 bp, Homo sapiens
  misc_feature: Incyte ID No: 1329880.35
ttttatgacgggcccggtgctgaagggcagggaacaacttgatggtgctactttgaactgcttttcttttctcctttttgcacaaagagtctcatgtctgatatttagacatgatgagctttgtgcaaaaggggagctggctacttctcgctctgcttcatcccactattattttggcacaacaggaagctgttgaaggaggatgttcccatcttggtcagtcctatgcggatagagatgtctggaagccagaaccatgccaaatatgtgtctgtgactcaggatccgttctctgcgatgacataatatgtgacgatcaagaattagactgccccaacccagaaattccatttggagaatgttgtgcagtttgcccacagcctccaactgctcctactcgccctcctaatggtcaaggacctcaaggccccaagggagatcctggacctcctggtattcctgggagaaatggtgaccctggtattccaggacaaccagggtcccctggttctcctggcccccctggaatctgtgaatcatgccctactggtcctcagaactattctccccagtatgattcatatgatgtcaagtctggagtagcagtaggaggactcgcaggctatcctggaccagctggccccccaggccctcccggtccccctggtacatctggtcatcctggttcccctggatctccaggataccaaggaccccctggtgaacctgggcaagctggtccttcaggccctccaggacctcctggtgctataggtccatctggtcctgctggaaaagatggagaatcaggtagacccggacgacctggagagcgaggattgcctggacctccaggtatcaaaggtccagctgggatacctggattccctggtatgaaaggacacagaggcttcgatggacgaaatggagaaaagggtgaaacaggtgctcctggattaaagggtgaaaatggtcttccaggcgaaaatggagctcctggacccatgggtccaagaggggctcctggtgagcgaggacggccaggacttcctggggctgcaggtgctcggggtaatgacggtgctcgaggcagtgatggtcaaccaggccctcctggtcctcctggaactgccggattccctggatccctggtgctaagggtgaagttggacctgcagggtctcctggttcaaatggtgcccctggacaaagaggagaacctggacctcagggacacgctggtgctcaaggtcctcctggccctcctgggattaatggtagtcctggtggtaaaggcgaaatgggtcccgctggcattcctggagctcctggactgatgggagcccggggtcctccaggaccagccggtgctaatggtgctcctggactgcgaggtggtgcaggtgagcctggtaagaatggtgccaaaggagagcccggaccacgtggtgaacgcggtgaggctggtattccaggtgttccaggagctaaaggcgaagatggcaaggatggatcacctggagaacctggtgcaaatgggcttccaggagctgcaggagaaaggggtgcccctgggttccgaggacctgctggaccaaatggcatcccaggagaaaagggtcctgctggagagcgtggtgctccaggccctgcagggcccagaggagctgctggagaacctggcagagatggcgtccctggaggtccaggaatgaggggcatgcccggaagtccaggaggaccaggaagtgatgggaaaccagggcctcccggaagtcaaggagaaagtggtcgaccaggtcctcctgggccatctggtccccgaggtcagcctggtgtcatgggcttccccggtcctaaaggaaatgatggtgctcctggtaagaatggagaacgaggtggccctggaggacctggccctcagggtcctcctggaaagaatggtgaaactggacctcagggacccccagggcctactgggcctggtggtgacaaaggagacacaggaccccctggtccacaaggattacaaggcttgcctggtacaggtggtcctccaggagaaaatggaaaacctggggaaccaggtccaaagggtgatgccggtgcacctggagctccaggaggcaagggtgatgctggtgcccctggtgaacgtggacctcctggattggcaggggccccaggacttagaggtggagctggtccccctggtcccgaaggaggaaagggtgctgctggtcctcctgggccacctggtgctgctggtactcctggtctgcaaggaatgcctggagaaagaggaggtcttggaagtcctggtccaaagggtgacaagggtgaaccaggcggtccaggtgctgatggtgtcccagggaaagatggcccaaggggtcctactggtcctattggtcctcctggcccagctggccagcctggagataagggtgaaggtggtgcccccggacttccaggtatagctggacctcgtggtagccctggtgagagaggtgaaactggccctccaggacctgctggtttccctggtgctcctggacagaatggtgaacctggtggtaaaggagaaagaggggctccgggtgagaaaggtgaaggaggccctcctggagttgcaggaccccctggaggttctggacctgctggtcctcctggtccccaaggtgtcaaaggtgaacgtggcagtcctggtggacctggtgctgctggcttccctggtgctcgtggtcttcctggtcctcctggtagtaatggtaacccaggacccccaggtcccagcggttctccaggcaaggatgggcccccaggtcctgcgggtaacactggtgctcctggcagccctggagtgtctggaccaaaaggtgatgctggccaaccaggagagaagggatcgcctggtgcccagggcccaccaggagctccaggcccacttgggattgctgggatcactggagcacggggtcttgcaggaccaccaggcatgccaggtcctaggggaagccctggccctcagggtgtcaagggtgaaagtgggaaaccaggagctaacggtctcagtggagaacgtggtccccctggaccccagggtcttcctggtctggctggtacagctggtgaacctggaagagatggaaaccctggatcagatggtcttccaggccgagatggatctcctggtggcaagggtgatcgtggtgaaaatggctctcctggtgcccctggcgctcctggtcatccaggcccacctggtcctgtcggtccagctggaaagagtggtgacagaggagaaagtggccctgctggccctgctggtgctcccggtcctgctggttcccgaggtgctcctggtcctcaaggcccacgtggtgacaaaggtgaaacaggtgaacgtggagctgctggcatcaaaggacatcgaggattccctggtaatccaggtgccccaggttctccaggccctgctggtcagcagggtgcaatcggcagtccaggacctgcaggccccagaggacctgttggacccagtggacctcctggcaaagatggaaccagtggacatccaggtcccattggaccaccagggcctcgaggtaacagaggtgaaagaggatctgagggctccccaggccacccagggcaaccaggccctcctggacctcctggtgcccctggtccttgctgtggtggtgttggagccgctgccattgctgggattggaggtgaaaaagctggcggttttgccccgtattatggagatgaaccaatggatttcaaaatcaacaccgatgagattatgacttcactcaagtctgttaatggacaaatagaaagcctcattagtcctgatggttctcgtaaaaaccccgctagaaactgcagagacctgaaattctgccatcctgaactcaagagtggagaatactgggttgaccctaaccaaggatgcaaattggatgctatcaaggtattctgtaatatggaaactggggaaacatgcataagtgccaatcctttgaatgttccacggaaacactggtggacagattctagtgctgagaagaaacacgtttggtttggagagtccatggatggtggttttcagtttagctacggcaatcctgaacttcctgaagatgtccttgatgtgcagctggcattccttcgacttctctccagccgagcttcccagaacatcacatatcactgcaaaaatagcattgcatacatggatcaggccagtggaaatgtaaagaaggccctgaagctgatggggtcaaatgaaggtgaattcaaggctgaaggaaatagcaaattcacctacacagttctggaggatggttgcacgaaacacactggggaatggagcaaaacagtctttgaatatcgaacacgcaaggctgtgagactacctattgtagatattgcaccctatgacattggtggtcctgatcaagaatttggtgtggacgttggccctgtttgctttttataaaccaaactctatctgaaatcccaacaaaaaaaatttaactccatatgtgttcctcttgttctaatcttgtcaaccagtgcaagtgaccgacaaaattccagttatttatttccaaaatgtttggaaacagtataatttgacaaagaaaaatgatacttctctttttttgctgttccaccaaatacaattcaaatgctttttgttttatttttttaccaattccaatttcaaaatgtctcaatggtgctataataaataaacttcaacactctttatgataacaacactgtgttatattctttgaatcctagcccatctgcagagcaatgactgtgctcaccagtaaaagataacctttctttctgaaatagtcaaatacgaaattagaaaagccctccctattttaactacctcaactggtcagaaacacagattgtattctatgagtcccagaagatgaaaaaaattttatacgttgataaaacttataaatttcattgattaatctcctggaagattggttttaaaaagaaaagtgtaatgcaagaatttaaagaaatatttttaaagccacaattattttaatattggatatcaactgcttgtaaaggtgctcctcttttttcttgtcattgctggtcaagattactaatatttgggaaggctttaaagacgcatgttatggtgctaatgtactttcacttttaaactctagatcagaattgttgacttgcattcagaacataaatgcacaaaatctgtacatgtctcccatcagaaagattcattggcatgccacaggggattctcctccttcatcctgtaaaggtcaacaataaaaaccaaattatggggctgcttttgtcacactagcatagagaatgtgttgaaatttaactttgtaagcttgtatgtggttgttgatcttttttttccttacagacacccataataaaatatcatattaatacacctcaagtcctctaagcacaatgcaatcaagttagaaatcagtatttcaaaaaacattatgacatttttcacataaaaacacatttctaaataatccactgattaaagaagaaatcataaagctaaagtatac

SEQ ID NO: 8 - DNA, 4360 bp, Homo sapiens
  misc_feature: Incyte ID No: 963555.1
  unsure 268, 288, 291: a, t, c, g, or other
tttgaaatccattggttcatctccataatacggggcaaaaccgccagctttttcacctccaatcccagtaatggcagcggctccaacaccaccacagcaaggaccagggcaccaggaggtccaggagggcctggttgccctgggtggcctggggagccctcagatcctctttcacctctgttacctcgaggccctggtggtccaatgggacctggatgtccactggttccatctttgcctggaggtccactgggtccaacaggtcctntggggcctgcagcaccagcngcnccaggtggcccaggagcaccatcatttcctttaggaccggggaagcccatgacaccaggctgacctcggggaccagatggcccaggaggacctggtcgaccactttctccttgacttccgggaggccctggtttcccatcacttcctggtcctcctggacttccgggcatgcccctcattcctggaactccaaggaacgcaatctctgccaggttctccagcagctcctctgggccctgcagggcccagaggagctgctggagaacctggcagagatggcgtccctggaggtccaggaatgaggggcatgcccggaagtccaggaggaccaggaagtgatgggaaaccagggcctcccggaagtcaaggagaaagtggtcgaccaggtcctcctgggccatctggtccccgaggtcagcctggtgtcatgggcttccccggtcctaaaggaaatgatggtgctcctggtaagaatggagaacgaggtggccctggaggacctggccctcagggtcctcctggaaagaatggtgaaactggacctcagggacccccagggcctactgggcctggtggtgacaaaggagacacaggaccccctggtccacaaggattacaaggcttgcctggtacaggtggtcctccaggagaaaatggaaaacctggggaaccaggtccaaagggtgatgccggtgcacctggagctccaggaggcaagggtgatgctggtgcccctggtgaacgtggacctcctggattggcaggggccccaggacttagaggtggagctggtccccctggtcccgaaggaggaaagggtgctgctggtcctcctgggccacctggtgctgctggtactcctggtctgcaaggaatgcctggagaaagaggaggtcttggaagtcctggtccaaagggtgacaagggtgaaccaggcggtccaggtgctgatggtgtcccagggaaagatggcccaaggggtcctactggtcctattggtcctcctggcccagctggccagcctggagataagggtgaaggtggtgcccccggacttccaggtatagctggacctcgtggtagccctggtgagagaggtgaaactggccctccaggacctgctggtttccctggtgctcctggacagaatggtgaacctggtggtaaaggagaaagaggggctccgggtgagaaaggtgaaggaggccctcctggagttgcaggaccccctggaggttctggacctgctggtcctcctggtccccaaggtgtcaaaggtgaacgtggcagtcctggtggacctggtgctgctggcttccctggtgctcgtggtcttcctggtcctcctggtagtaatggtaacccaggacccccaggtcccagcggttctccaggcaaggatgggcccccaggtcctgcgggtaacactggtgctcctggcagccctggagtgtctggaccaaaaggtgatgctggccaaccaggagagaagggatcgcctggtgcccagggcccaccaggagctccaggcccacttgggattgctgggatcactggagcacgggggtcttgcaggaccaccaggcatgccaggtcctaggggaagccctggccctcagggtgtcaagggtgaaagtgggaaaccaggagctaacggtctcagtggagaacgtggtccccctggaccccagggtcttcctggtctggctggtacagctggtgaacctggaagagatggaaaccctggatcagatggtcttccaggccgagatggatctcctggtggcaagggtgatcgtggtgaaaatggctctcctggtgcccctggcgctcctggtcatccaggcccacctggtcctgtcggtccagctggaaagagtggtgacagaggagaaagtggccctgctggccctgctggtgctcccggtcctgctggttcccgaggtgctcctggtcctcaaggcccacgtggtgacaaaggtgaaacaggtgaacgtggagctgctggcatcaaaggacatcgaggattccctggtaatccaggtgccccaggttctccaggccctgctggtcagcagggtgcaatcggcagtccaggacctgcaggccccagaggacctgttggacccagtggacctcctggcaaagatggaaccagtggacatccaggtcccattggaccaccagggcctcgaggtaacagaggtgaaagaggatctgagggctccccaggccacccagggcaaccaggccctcctggacctcctggtgcccctggtccttgctgtggtggtgttggagccgctgccattgctgggattggaggtgaaaaagctggcggttttgccccgtattatggagatgacacaatggatttcaaaatcaacaccgatgagattatgacttcactcaagtctgttaatggacaaatagaaagcctcattagtcctgatggttctcgtaaaaaccccgctagaaactgcagagacctgaaattctgccatcctgaactcaagagtggagaatactgggttgaccctaaccaaggatgcaaattggatgctatcaaggtattctgtattatggaaactggggaaacatgcataagtgccaatcctttgaatgttccacggaaacactggtggacagattctagtgctgagaagaaacacgtttggtttggagagtccatggatggtggttttcagtttagctacggcaatcctgaacttcctgaagatgtccttgatgtgcagctggcattccttcgacttctctccagccgagcttcccagaacatcacatatcactgcaaaaatagcattgcatacatggatcaggccagtggaaatgtaaagaaggccctgaagctgatggggtcaaatgaaggtgaattcaaggctgaaggaaatagcaaattcacctacacagttctggaggatggttgcacgaaacacactggggaatggagcaaaacagtctttgaatatcgaacacgcaaggctgtgagactacctattgtagatattgcaccctatgacattggtggtcctgatcaagaatttggtgtggacgttggccctgtttgctttttataaaccaaactctatctgaaatcccaacaaaaaaaatttaactccatatgtgttcctcttgttctaatcttgtcaaccagtgcaagtgaccgacaaaattccagttatttatttccaaaatgtttggaaacagtataatttgacaaagaaaaatgatacttctctttttttgctgttccaccaaatacaattcaaatgctttttgttttatttttttaccaattccaatttcaaaatgtctcaatggtgctataataaataaacttcaacactctttatgataacaacactgtgttatattctttgaatcctagcccatctgcagagcaatgactgtgctcaccagtaaaagataacctttctttctgaaatagtcaaatacgaaattagaaaagccctccctattttaactacctcaactggtcagaaacacagattgtattctatgagtcccagaagatgaaaaaaattttatacgttgataaaacttataaatttcattgattaatctcctggaagattggtttaaaaagaaaagtgtaatgcaagaatttaaagaaatatttttaaagccacaattattttaatattggatatcaactgcttgtaaaggtgctcctcttttttcttgtcattgctggtcaagattactaatatttgggaaggctttaaagacgcatgttatggtgctaatgtactttcacttttaaactctagatcagaattgttgacttgcattcagaacataaatgcacaaaatctgtacatgtctcccatcagaaagattcattggcatgccacaggggattctcctccttcatcctgtaaaggtcaacaataaaaaccaaattatggggctgcttttgtcacactagcatagagaatgtgttgaaatttaactttgtaagcttgtatgtggttgttgatctttttttccttacagacacccataataaaatatcatattaaaattc

SEQ ID NO: 9 - DNA, 1505 bp, Homo sapiens
  misc_feature: Incyte ID No: 199471.2
caggaaggctgagagaaagggcaggtccccgctgcgtggggctgggcttaaaggctcgtcgcgcctgccaaaggacctgacgacgtgctgcgtcgttacttttgaaacgcttggcggggaagtgctgttggagccgctgtggttgctgtccgcggagtggaagcgccgtgcttttgtttgtgtccctggccatggcgctgcagctctcccgggagcagggaatcaccctgcgcgggagcgccgaaatcgtggccgagttcttctcattcggcatcaacagcattttatatcagcgtggcatatatccatctgaaacctttactcgagtgcagaaatacggactcaccttgcttgtaactactgatcttgagctcataaaatacctaaataatgtggtggaacaactgaaagattggttatacaagtgttcagttcagaaactggttgtagttatctcaaatattgaaagtggtgaggtcctggaaagatggcagtttgatattgagtgtgacaagactgcaaaagatgacagtgcacccagagaaaagtctcagaaagctatccaggatgaaatccgttcagtgatcagacagatcacagctacggtgacatttctgccactgttggaagtttcttgttcatttgatctgctgatttatacagacaaagatttggttgtacctgaaaaatgggaagagtcgggaccacagtttattaccaattctgaggaagtccgccttcgttcatttactactacaatccacaaagtaaatagcatggtggcctacaaaattcctgtcaatgactgaggatgacatgaggaaaataatgtaattgtaattttgaaatgtggttttcctgaaatcaggtcatctatagttgatatgttttatttcattggttaatttttacatggagaaaaccaaaatgatacttactgaactgtgtgtaattgttccttttatttttttggtacctatttgacttaccatggagttaacatcatgaatttattgcacattgttcaaaaggaaccaggaggtttttttgtcaacattgtgatgtatattcctttgaagatagtaactgtagatggaaaaacttgtgctataaagctagatgctttcctaaatcagatgttttggtcaagtagtttgactcagtataggtagggagatatttaagtataaaatacaacaaaggaagtctaaatattcagaatctttgttaaggtcctgaaagtaactcataatctataaacaatgaaatattgctgtatagctccttttgaccttcatttcatgtatagttttccctattgaatcagtttccaattatttgactttaatttatgtaacttgaacctatgaagcaatggatatttgtactgtttaatgttctgtgatacagaactcttaaaaatgttttttcatgtgttttataaaatcaagttttaagtgaaagtgaggaaataaagttaagtttgttttaaatttgtcttaaaa

SEQ ID NO: 10 - DNA, 632 bp, Homo sapiens
  misc_feature: Incyte ID No: 048849.1
  unsure 595: a, t, c, g, or other
aaaagtaaaatttaaaagcccctttcttcaacatggaaagaaaggaattaaactaaccctcagagagaggcagtaaaatgtagatgtgccaatcacattgaaattcttaatgtaaccaggcagcttaacttcaaaatgcattttaaaacttgtatttttctttttcttggatttcaagatataaccttgcagcaaactgcagaagcattttccttagccttaaaatagattccatgttctaccctttctcaccatatatactcccttcacatttatctaactgtatgctagcatctaattatgtgccatcttagaagttccaagggccaatcttcagacggaaagtccaaatctggacccaggtgcaaaattccagagattacttcaaagtggctagtcaacaacttggccattgtcgaaatgacaccagcccatgctccccggtggattgaaacccaagatagccactggaacaagatacacagacattgtactccgcacaatttttgcgtgccatccattatcaagttttccctttttaagcccttggcttgcccctcaaaattgaagtggttgctttggatgggaatctagncatgtctccattactactattgtttaataaaatgctg

SEQ ID NO: 11 - DNA, 85 bp, Homo sapiens
  misc_feature: Incyte ID No: 278283.1
  unsure 11, 19, 23, 35, 37, 46, 57, 65, 68: a, t, c, g, or other
tttctccaggncctgctgntcancagggtgcaatncngcagtccangacctgcaggncccagtanganctgttggatcccagtgg

SEQ ID NO: 12 - DNA, 1257 bp, Homo sapiens
  misc_feature: Incyte ID No: 978433CB1
gaggcgcgcgggtgaaaggcgcattgatgcagcctgcggcggcctcggagcgcggcggagcagacgctgaccacgttcctctcctcggtctcctccgcctccagctccgcgctgcccggcagccgggagccatgcgaccccagggccccgccgcctccccgcagcggctccgcggcctcctgctgctcctgctgctgcagctgcccgcgccgtcgagcgcctctgagatccccaaggggaagcaaaaggcgcagctccggcagagggaggtggtggacctgtataatggaatgtgcttacaagggccagcaggagtgcctggtcgagacgggagccctggggccaatggcattccgggtacacctgggatcccaggtcgggatggattcaaaggagaaaagggggaatgtctgagggaaagctttgaggagtcctggacacccaactacaagcagtgttcatggagttcattgaattatggcatagatcttgggaaaattgcggagtgtacatttacaaagatgcgttcaaatagtgctctaagagttttgttcagtggctcacttcggctaaaatgcagaaatgcatgctgtcagcgttggtatttcacattcaatggagctgaatgttcaggacctcttcccattgaagctataatttatttggaccaaggaagccctgaaatgaattcaacaattaatattcatcgcacttcttctgtggaaggactttgtgaaggaattggtgctggattagtggatgttgctatctgggttggcacttgttcagattacccaaaaggagatgcttctactggatggaattcagtttctcgcatcattattgaagaactaccaaaataaatgctttaattttcatttgctacctctttttttattatgccttggaatggttcacttaaatgacattttaaataagtttatgtatacatctgaatgaaaagcaaagctaaatatgtttacagaccaaagtgtgatttcacactgtttttaaatctagcattattcattttgcttcaatcaaaagtggtttcaatattttttttagttggttagaatactttcttcatagtcacattctctcaacctataatttggaatattgttgtggtcttttgttttttctcttagtatagcatttttaaaaaaatataaaagctaccaatctttgtacaatttgtaaatgttaagaattttttttatatctgttaaataaaaattatttccaacaacctta

SEQ ID NO: 13 - DNA, 1736 bp, Homo sapiens
  misc_feature: Incyte ID No: 611514CB1
ggaacagcggcctctgacaccagcacagcaaacccgccgggatcaaagtgtaccagtcggcagcatggctacgaaatgtgggaattgtggacccggctactccacccctctggaggccatgaaaggacccagggaagagatcgtctacctgccctgcatttaccgaaacacaggcactgaggccccagattatctggccactgtggatgttgaccccaagtctccccagtattgccaggtcatccaccggctgcccatgcccaacctgaaggacgagctgcatcactcaggatggaacacctgcagcagctgcttcggtgatagcaccaagtcgcgcaccaagctggtgctgcccagtctcatctcctctcgcatctatgtggtggacgtgggctctgagccccgggccccaaagctgcacaaggtcattgagcccaaggacatccatgccaagtgcgaactggcctttctccacaccagccactgcctggccagcggggaagtgatgatcagctccctgggagacgtcaagggcaatggcaaagggggttttgtgctgctggatggggagacgttcgaggtgaaggggacatgggagagacctgggggtgctgcaccgttgggctatgacttctggtaccagcctcgacacaatgtcatgatcagcactgagtgggcagctcccaatgtcttacgagatggcttcaaccccgctgatgtggaggctggactgtacgggagccacttatatgtatgggactggcagcgccatgagattgtgcagaccctgtctctaaaagatgggcttattcccttggagatccgcttcctgcacaacccagacgctgcccaaggctttgtgggctgcgcactcagctccaccatccagcgcttctacaagaacgagggaggtacatggtcagtggagaaggtgatccaggtgccccccaagaaagtgaagggctggctgctgcccgaaatgccaggcctgatcaccgacatcctgctctccctggacgaccgcttcctctacttcagcaactggctgcatggggacctgaggcagtatgacatctctgacccacagagaccccgcctcacaggacagctcttcctcggaggcagcattgttaagggaggccctgtgcaagtgctggaggacgaggaactaaagtcccagccagagcccctagtggtcaagggaaaacgggtggctggaggccctcagatgatccagctcagcctggatgggaagcgcctctacatcaccacgtcgctgtacagtgcctgggacaagcagttttaccctgatctcatcagggaaggctctgtgatgctgcaggttgatgtagacacagtaaaaggagggctgaagttgaaccccaacttcctggtggacttcgggaaggagccccttggcccagcccttgcccatgagctccgctaccctgggggcgattgtagctctgacatctggatttgaactccaccctcatcacccacactccctattttgggccctcacttccttggggacctggcttcattctgctctctcttggcacccgacccttggcagcatgtaccacacagccaagctgagactgtggcaatgtgttgagtcatatacatttactgaccactgttgcttgttgctcactgtgctgcttttccatgagctcttggaggcaccaagaaataaactcgtaaccctgtccttcaaaaaaaaaaaaaaa

SEQ ID NO: 14 - DNA, 11065 bp, Homo sapiens
  misc_feature: Incyte ID No: 1382907.35
  unsure 6438, 6453, 6780: a, t, c, g, or other
ccggcctgggaggtgcgtcagatccgagctcgccatccagtttcctctccactagtccccccagttggagatctgggaccaacaaggcaccatggcgcagaagggccaactcagtgacgatgagaagttcctctttgtggacaaaaacttcatcaacagcccagtggcccaggctgactgggccgccaagagactcgtctgggtcccctcggagaagcaggcttcgaggcagccagcattaaggaggagaagggggatgaggtggttgtggagctggtggagaatggcaagaaggtcacggttgggaaagatgacatccagaagatgaacccacccaagttctccaaggtggaggacatggcggagctgacgtgcctcaacgaagcctccgtgctacacaacctgagggagcggtacttctcagggctaatatatacgtactctggcctcttctgcgtggtggtcaacccctataaacacctgcccatctactcggagaagatcgtcgacatgtacaagggcaagaagaggcacgagatgccgcctcacatctacgccatcgcagacacggcctaccggagcatgcttcaagatcgggaggaccagtccattctatgcacaggcgagtctggagccgggaaaaccgaaaacaccaagaaggtcattcagtacctggccgtggtggcctcctcccacaagggcaagaaagacacaagtatcacgggagagctggaaaagcagcttctacaagcaaacccgattctggaggctttcggcaacgccaaaacagtgaagaacgacaactcctcacgattcggcaaattcatccgcatcaacttcgacgtcacgggttacatcgtgggagccaacattgagacctatctgctagaaaaatcacgggcaattcgccaagccagagacgagaggacattccacatcttttactacatgattgctggagccaaggagaagatgagaagtgacttgcttttggagggcttcaacaactacaccttcctctccaatggctttgtgcccatcccagcagcccaggatgatgagatgttccaggaaaccgtggaggccatggcaatcatgggtttcagcgaggaggagcagctatccatattgaaggtggtatcatcggtcctgcagcttggaaatatcgtcttcaagaaggaaagaaacacagaccaggcgtccatgccagataacacagctgctcagaaagtttgccacctcatgggaattaatgtgacagatttcaccagatccatcctcactcctcgtatcaaggttgggcgagatgtggtacagaaagctcagacaaaagaacaggctgactttgctgtagaggctttggccaaggcaacatatgagcgccttttccgctggatactcacccgcgtgaacaaagccctggacaagacccatcggcaaggggcttccttcctggggatcctggatatagctggatttgagatctttgaggtgaactccttcgagcagctgtgcatcaactacaccaacgagaagctgcagcagctcttcaaccacaccatgttcatcctggagcaggaggagtaccagcgcgagggcatcgagtggaacttcatcgactttgggctggacctacagccctgcatcgagctcatcgagcgaccgaacaaccctccaggtgtgctggccctgctggacgaggaatgctggttccccaaagccacggacaagtctttcgtggagaagctgtgcacggagcagggcagccaccccaagttccagaagcccaagcagctcaaggacaagactgagttctccatcatccattatgccgggaaggtggactataatgcgagtgcctggctgaccaagaatatggacccgctgaatgacaacgtgacttccctgctcaatgcctcctccgacaagtttgtggccgacctgtggaaggacgtggaccgcatcgtgggcctggaccagatggccaagatgacggagagctcgctgcccagcgcctccaagaccaagaagggcatgttccgcacagtggggcagctgtacaaggagcagctgggcaagctgatgaccacgctacgcaacaccacgcccaacttcgtgcgctgcatcatccccaaccacgagaagaggtccggcaagctggatgcgttcctggtgctggagcagctgcggtgcaatggggtgctggaaggcattcgcatctgccggcagggcttccccaaccggatcgtcttccaggagttccgccaacgctacgagatcctggcggcgaatgccatccccaaaggcttcatggacgggaagcaggcctgcattctcatgatcaaagccctggaacttgaccccaacttatacaggatagggcagagcaaaatcttcttccgaactggcgtcctggcccacctagaggaggagcgagatttgaagatcaccgatgtcatcatggccttccaggcgatgtgtcgtggctacttggccagaaaggcttttgccaagaggcagcagcagctgaccgccatgaaggtgattcagaggaactgcgccgcctacctcaagctgcggaactggcagtggtggaggcttttcaccaaagtgaagccactgctgcaggtgacacggcaggaggaggagatgcaggccaaggaggatgaactgcagaagaccaaggagcggcagcagaaggcagagaatgagcttaaggagctggaacagaagcactcgcagctgaccgaggagaagaacctgctacaggaacagctgcaggcagagacagagctgtatgcagaggctgaggagatgcgggtgcggctggcggccaagaagcaggagctggaggagatactgcatgagatggaggcccgcctggaggaggaggaagacaggggccagcagctacaggctgaaaggaagaagatggcccagcagatgctggaccttgaagaacagctggaggaggaggaagctgccaggcagaagctgcaacttgagaaggtcacggctgaggccaagatcaagaaactggaggatgagatcctggtcatggatgatcagaacaataaactatcaaaagaacgaaaactccttgaggagaggattagtgacttaacgacaaatcttgcagaagaggaagaaaaggccaagaatcttaccaagctgaaaaacaagcatgaatctatgatttcagaactggaagtgcggctaaagaaggacgagaagagccgacaggagctggagaagctgaaacggaagctggagggtgatgccagcgacttccacgagcagatcgctgacctccaggcgcagatcgcagagctcaagatgcagctggccaagaaggaggaggagctgcaggcggccctggccaggcttgacgatgaaatcgctcagaagaacaatgccctgaagaagatccgggagctggagggccacatctcagacctccaggaggacctggactcagagcgggccgccaggaacaaggctgaaaagcagaagcgagacctcggcgaggagctggaggccctaaagacagagctggaagacacactggacagcacagccactcagcaggagctcagggccaagagggagcaggaggtgacggtgctgaagaaggccctggatgaagagacgcggtcccatgaggctcaggtccaggagatgaggcagaaacacgcacaggcggtggaggagctcacagagcagcttgagcagttcaagagggccaaggcgaacctagacaagaataagcagacgctggagaaagagaacgcagacctgggccggagagctgcgggtcctgggccaggccaagcaggaggtggaacataagaagaagaagctggaggcgcaggtgcaggagctgcagtccaagtgcagcgatggggagcgggcccgggcggagctcaatgagcaaagtccacaagctgcagaatgaagttgagagcgtcacagggatgcttaacgaggccgaggggaaggccattaagctggccaaggacgtggcgtccctcagttcccagctccaggacacccaggagttgcttcaagaagaaacccggcagaagctcaacgtgtctacgaagctgcgccagctggaggaggagcggaacagcctgcaagaccagctggacgaggagatggaggccaagcagaacctggagcgccacatctccactctcaacatccagctctccgactcgaagaagaagctgcaggactttgccagcaccgtggaagctctggaagaggggaagaagaggttccagaaggagatcgagaacctcacccagcagtacgaggagaaggcggccgcttatgataaactggaaaagaccaagaacaggcttcagcaggagctggacgacctggttgttgatttggacaaccagcggcaactcgtgtccaacctggaaaagaagcagaggaaatttgatcagttgttagccgaggagaaaaacatctcttccaaatacgcggatgagagggacagagctgaggcagaagccagggagaaggaaaccaaggccctgtccctggctcgggcccttgaagaggccttggaagccaaagaggaactcgagcggaccaacaaaatgctcaaagccgaaatggaagacctggtcagctccaaggatgacgtgggcaagaacgtccatgagctggagaagtccaagcgggccctggagacccagatggaggagatgaagacgcagctggaagagctggaggacgagctgcaagccacggaggacgccaaactgcggctggaagtcaacatgcaggcgctcaagggccagttcgaaagggatctccaagcccgggacgagcagaatgaggagaagaggaggcaactgcagagacagcttcacgagtatgagacggaactggaagacgagcgaaagcaacgtgccctggcagctgcagcaaagaagaagctggaaggggacctgaaagacctggagcttcaggccgactctgccatcaaggggagggaggaagccatcaagcagctacgcaaactgcaggctcagatgaaggactttcaaagagagctggaagatgcccgtgcctccagagatgagatctttgccacagccaaagagaatgagaagaaagccaagagcttggaagcagacctcatgcagctacaagaggacctcgccgccgctgagagggctcgcaaacaagcggacctcgagaaggaggaactggcagaggagctggccagtagcctgtcgggaaggaacgcactccaggacgagaagcgccgcctggaggcccggatcgcccagctggaggaggagctggaggaggagcagggcaacatggaggccatgagcgaccgggtccgcaaagccacacagcaggccgagcagctcagcaacgagctggccacagagcgcagcacggcccagaagaatgagagtgcccggcagcagctcgagcggcagaacaaggagctccggagcaagctccacgagatggagggggccgtcaagtccaagttcaagtccaccatcgcggcgctggaggccaagattgcacagctggaggagcaggtcgagcaggaggccagagagaaacaggcggccaccaagtcgctgaagcagaaagacaagaagctgaaggaaatcttgctgcaggtggaggacgagcgcaagatggccgagcagtacaaggagcaggcagagaaaggcaatgccagggtcaagcagctcaagaggcagctggaggaggcagaggaggagtcccagcgcatcaacgccaaccgcaggaagctgcagcgggagctggatgaggccacggagagcaacgaggccatgggccgcgaggtgaacgcactcaagagcaagctcagagggccccccccacaggaaacttcgcagtgatgcaccaggcgaggaaacgagacctctttcgttccttctagaaggtctggaggacgtagagttattgaaaatgcagatggttctgaggaggaaacggacactcgagacgcagacttcaatggaaccaaggccagtgaataagcaactttctacagttttgcaccacggcaagaaaaccaaaaaccaaaacaaacaaaaaaaacccaacaacaacccagaacaaagcaaaacccagcagactgtacttagcattgtctaaatccattctcaaattccaaatatcacagacacccctcacacaaggaatataaaaaccaccaccctccagcctgggcaacgtagtaaaacctcatctatacaagaatttaaaaataagctgggcgtggtggtacacacctgtggtcccagctactagggaggctgagccaggaagaacgctccagcccaggacttcgaggctgcaatgagctataattgcatcattgcactccagcctgggcaacagagaccctgtctcaaccaccaccancaccaccacccctantacccctgtattcaaggtaaaaattgaagtttgtatgatgtaagagatgagaaaaacccaacaggaaacacagacacatcctccagttctatcaatggattgtgcagacactgagtttttagaaaaacatatccacggtaaccggtccctggcaattctgtttacatgaaatggggagaaagtcaccgaaatgggtgccgccggcccccactcccaattcattccctaacctgcaaacctttccaacttctcacgtcaggcctttgagaattctttccccctctcctggtttccacacctcagacacgcacagttcaccaagtgccntctgtagtcacatgaattgaaaaggagacgctgctcccacggaggggagcaggaatgctgcactgtttacaccctgactgtgatttataaccatttattagtgaaagtgtttttaagcacagtcagggtgtaaacagtgcagcattcctgctcccctccgtgggagcagcgtctccttttcaattcatgtgactacagaaggcacttggtgaactgtgcgtgtctgaggtgtggaaaccaggagagggggaaagaattctcaaaggcctgacgtgagaagttggaaaggtttgcaggttagggaatgaattgggagtgggggccggcggcacccatttcggtgactttctccccatttcatgtaaacagaattgccagggaccggttaccgtggatatgtttttctaaaaactcagtgtctgcacaatccattgatagaactggaggatgtgtctgtgtttcctgttgggtttttctcatctcttacatcatacaaacttcaatttttaccttgaatacaggggtagtaggggtggtggtgttggtggtggttgagacagggtctctgttgcccaggctggagtgcaatgatgcaattatagctcattgcagcctcgaagtcctgggctggagcgttcttcctggctcagcctccctagtagctgggaccacaggtgtgtaccaccacgcccagcttatttttaaattcttgtatagatgaggttttactacgttgcccaggctggagggtggtggtttttatattccttgtgtgaggggtgtctgtgatatttggaatttgagaatggatttagacaatgctaagtacagtctgctgggttttgctttgttctgggttgttgttgggttttttttgtttgtttgttttggtttttggttttcttgccgtggtgcaaaactgtagaaagttgcttattcactggccttggttccattgaagtctgcgtctcgagtgtccgtttcctcctcagaaccatctgcattttcaataactctacgtcctccagaccttctagaaggaacgaaagaggtctcgtttcctcgcctgagcttgctcttgagtgcgttcacctcgcggcccatggcctcgttgctctccgtggcctcatccagctcccgctgcagcttcctgcggttggcgttgatgcgctgggactcctcctctgcctcctccagctgcctcttgagctgcttgaccctggcattgcctttctctgcctgctccttgtactgctcggccatcttgcgctcgtcctccacctgcagcaagatttccttcagcttcttgtctttctgcttcagcgacttggtggccgcctgtttctctctggcctcctgctcgacctgctcctctagctgtgcaatcttggcctccagcgccgcgatggtggatttgaacttggacttgacggccccctccatctcgtggagcttgctccggagctccttgttctgccgctcgagctgctgccgggcactctcattcttctgggccgtgctgcgctctgtggccagctcgttgctgagctgctcggcctgctgtgtggctttgcggacccggtcgctcatggcctccatgttgccctgctcctcctccagctcctcctccagctgggcgatccgggcctccaggcggcgcttctcgtcctggagtgcgttccttcccgacaggctactggccagctcctctgccagttcctccttctcgaggtccgcttgtttgcgagccctctcagcggcggcgaggtcctcttgtagctgcatgaggtctgcttccaagctcttggctttcttctcattctctttggctgtggcaaagatctcatctctggaggcacgggcatcttccagctctctttgaaagtccttcatctgagcctgcagtttgcgtagctgcttgatggcttcctccctccccttgatggcagagtcggcctgaagctccaggtctttcaggtccccttccagcttcttctttgctgcagctgccagggcacgttgctttcgctcgtcttccagttccgtctcatactcgtgaagctgtctctgcagttgcctcctcttctcctcattctgctcgtcccgggcttggagatccctttcgaactggcccttgagcgcctgcatgttgacttccagccgcagtttggcgtcctccgtggcttgcagctcgtcctccagctcttccagctgcgtcttcatctcctccatctgggtctccagggcccgcttggacttctccagctcatggacgttcttgcccacgtcatccttggagctgaccaggtcttccatttcggctttgagcattttgttggtccgctcgagttcctctttggcttccaaggcctcttcaagggcccgagccagggacagggccttggtttccttctccctggcttctgcctcagctctgtccctctcatccgcgtatttggaagagatgtttttctcctcggctaacaactgatcaaatttcctctgcttcttttccaggttggacacgagttgccgctggttgtccaaatcaacaaccaggtcgtccagctcctgctgaagcctgttcttggtcttttccagtttatcatacgcggccgccttctcctcgtactgctgggtgaggttctcgatctccttctggaacctcttcttcccctcttccagagcttccacggtgctggcaaagtcctgcagcttcttcttcgagtcggagagctggatgttgagagtggagatgtggcgctccaggttctgcttggcctccatctcctcgtccagctggtcttgcaggctgttccgctcctcctccagctggcgcagcttcgtagacacgttgagcttctgccgggtttcttcttgaagcagctcctgggtgtcctggagctgggaactgagggacgccacgtccttggccagcttaatggccttcccctcggcctcgttaagcatccctgtgacgctctcaacttcattctgcagcttgtggactttgtcattgagctccgcccgggcccgctccccatcgctgcacttggactgcagctcctgcacctgcgcctccagcttcttcttcttatgttccacctcctgcttggcctggcccaggacccgcagctccccggccaggtctgcgttctctttctccagcgtctgcttattcttgtctaggttcgccttggccctcttgaactgctcaagctgctctgtgagctcctccaccgcctgtgcgtgtttctgcctcatctcctggacctgagcctcatgggaccgcgtctcttcatccagggccttcttcagcaccgtcacctcctgctccctcttggccctgagctcctgctgagtggctgtgctgtccagtgtgtcttccagctctgtctttagggcctccagctcctcgccgaggtctcgcttctgcttttcagccttgttcctggcggcccgctctgagtccaggtcctcctggaggtctgagatgtggccctccagctcccggatcttcttcagggcattgttcttctgagcgatttcatcgtcaagcctggccagggccgcctgcagctcctcctccttcttggccagctgcatcttgagctctgcgatctgcgcctggaggtcagcgatctgctcgtggaagtcgctggcatcaccctccagcttccgtttcagcttctccagctcctgtcggctcttctcttccttctttagccgcacttccagttctgaaatcatagattcatgcttgtttttcagcttggtaagattcttggccttttcttcctcttctgcaagatttgtcgttaagtcactaatcctctcctcaaggagttttcgttcttttgatagtttattgttctgatcatcccatgaccaggatctcatcctccagtttcttgatcttggcctcagccgtgaccttctcaagttgcagcttctgcctggcagcttcctcctcctccagctgttcttcaaggtccagcatctgctgggccatcttcttcctttcagcctgtagctgctggcccctgtcttcctcctcctccaggcgggcctccatctcatgcagtatctcctccagctcctgcttcttggccgccagccgcacccgcatctcctcagcctctgcatacagctctgtctctgcctgcagctgttcctgtagcaggttcttctcctcggtcagctgcgagtgcttctgttccagctccttaagctcattctctgccttctgctgccgctccttggtcttctgcagttcatccgccag

SEQ ID NO: 15 - DNA, 6608 bp, Homo sapiens
  misc_feature: Incyte ID No: 350509.2
cgccagtagcgggttgcaggcgcaccctcccctccagtgcggccacgcagctgtcagtgccgccgccactgcgaggctggagcggagcccgggtggccgagggaggggaccccgcgagagggccgcgcgccggccgccgccgccccggcgcccaggctcggtgctggagagtcatgcctgtgagccctgggcacctcctgatgtcctgcgaggtcacggtgttcccaaacctcagggttgccctgccccactccagaggctctcaggccccaccccggagccctctgtgcggagccgcctcctcctggccagttccccagtagtcctgaagggagacctgctgtgtggagcctcttctgggacccagccatgagtgtggagctgagcaactgaacctgaaactcttccactgtgagtcaaggaggcttttccgcacatgaaggacgctgagcgggaaggactcctctctgcctgcagttgtagcgagtggaccagcaccaggggctctctagactgcccctcctccatcgccttccctgcctctccaggacagagcagccacgtctgcacacctcgccctctttacactcagttttcagagcacgtttctcctatttcctgcgggttgcagcgcctacttgaacttactcagaccacctacttctctagcagcactgggcgtccctttcagcaagacgatggctgtgctcaggcagctggcgctcctcctctggaagaactacaccctgcagaagcggaaggtcctggtgacggtcctggaactcttcctgccattgctgttttctgggatcctcatctggctccgcttgaagattcagtcggaaaatgtgcccaacgccaccatctacccgggccagtccatccaggagctgcctctgttcttcaccttccctccgccaggagacacctgggagcttgcctacatcccttctcacagtgacgctgccaagaccgtcactgagacagtgcgcagggcacttgtgatcaacatgcgagtgcgcggctttccctccgagaaggactttgaggactacattaggtacgacaactgctcgtccagcgtgctggccgccgtggtcttcgagcaccccttcaaccacagcaaggagcccctgccgctggcggtgaaatatcacctacggttcagttacacacggagaaattacatgtggacccaaacaggctcctttttcctgaaagagacagaaggctggcacactacttcccttttcccgcttttcccaaacccaggaccaagggaacctacatcccctgatggcggagaacctgggtacatccgggaaggcttcctggccgtgcagcatgctgtggaccgggccatcatggagtaccatgccgatgccgccacacgccagctgttccagagactgacggtgaccatcaagaggttcccgtacccgccgttcatcgcagaccccttcctcgtggccatccagtaccagctgcccctgctgctgctgctcagcttcacctacaccgcgctcaccattgcccgtgctgtcgtgcaggagaaggaaaggaggctgaaggagtacatgcgcatgatggggctcagcagctggctgcactggagtgcctggttcctcttgttcttcctcttcctcctcatcgccgcctccttcatgaccctgctcttctgtgtcaaggtgaagccaaatgtagccgtgctgtcccgcagcgacccctccctggtgctcgccttcctgctgtgcttcgccatctctaccatctccttcagcttcatggtcagcaccttcttcagcaaagccaacatggcagcagccttcggaggcttcctctacttcttcacctacatcccctacttcttcgtggcccctcggtacaactggatgactctgagccagaagctctgctcctgcctcctgtctaatgtcgccatggcaatgggagcccagctcattgggaaatttgaggcgaaaggcatgggcatccagtggcgagacctcctgagtcccgtcaacgtggacgacgacttctgcttcgggcaggtgctggggatgctgctgctggactctgtgctctatggcctggtgacctggtacatggaggccgtcttcccagggcagttcggcgtgcctcagccctggtacttcttcatcatgccctcctattggtgtgggaagccaagggcggttgcagggaaggaggaagaagacagtgaccccgagaaagcactcagaaacgagtactttgaagccgagccagaggacctggtggcggggatcaagatcaagcacctgtccaaggtgttcagggtgggaaataaggacagggcggccgtcagagacctgaacctcaacctgtacgagggacagatcaccgtcctgctgggccacaacggtgccgggaagaccaccaccctctccatgctcacaggtctctttccccccaccagtggacgggcatacatcagcgggtatgaaatttcccaggacatggttcagatccggaagagcctgggcctgtgcccgcagcacgacatcctgtttgacaaccttgacagtcgcagagcacctttatttctacgcccagctgaagggcctgtcacgtcagaagtgccctgaagaagtcaagcagatgctgcacatcatcggcctggaggacaagtggaactcacggagccgcttcctgagcgggggcatgaggcgcaagctctccatcggcatcgccctcatcgcaggctccaaggtgctgatactggacgagcccacctcgggcatggacgccatctccaggagggccatctgggatcttcttcagcggcagaaaagtgaccgcaccatcgtgctgaccacccacttcatggacgaggctgacctgctgggagaccgcatcgccatcatggccaagggggagctgcagtgctgcgggtcctcgctgttcctcaagcagaaatacggtgccggctatcacatgacgctggtgaaggagccgcactgcaacccggaagacatctcccagctggtccaccaccacgtgcccaacgccacgctggagagcagcgctggggccgagctgtctttcatccttcccagagagagcacgcacaggtttgaaggtctctttgctaaactggagaagaagcagaaagagctgggcattgccagctttggggcatccatcaccaccatggaggaagtcttccttcgggtcgggaagctggtggacagcagtatggacatccaggccatccagctccctgccctgcagtaccagcacgagaggcgcgccagcgactgggctgtggacagcaacctctgtggggccatggacccctccgacggcattggagccctcatcgaggaggagcgcaccgctgtcaagctcaacactgggctcgccctgcactgccagcaattctgggccatgttcctgaagaaggccgcatacagctggcgcgagtggaaaatggtggcggcacaggtcctggtgcctctgacctgcgtcaccctggccctcctggccatcaactactcctcggagctcttcgacgaccccatgctgaggctgaccttgggcgagtacggcagaaccgtcgtgcccttctcagttcccgggacctcccagctgggtcagcagctgtcagagcatctgaaagacgcactgcaggctgagggacaggagccccgcgaggtgctcggtgacctggaggagttcttgatcttcagggcttctgtggaggggggcggctttaatgagcggtgccttgtggcagcgtccttcagagatgtgggagagcgcacggtcgtcaacgccttgttcaacaaccaggcgtaccactctccagccactgccctggccgtcgtggacaaccttctgttcaagctgctgtgcgggcctcacgcctccattgtggtctccaacttcccccagccccggagcgccctgcaggctgccaaggaccagtttaacgagggccggaagggattcgacattgccctcaacctgctcttcgccatggcattcttggccagcacgttctccatcctggcggtcagcgagagggccgtgcaggccaagcatgtgcagtttgtgagtggagtccacgtggccagtttctggctctctgctctgctgtgggacctcatctccttcctcatccccagtctgctgctgctggtggtgtttaaggccttcgacgtgcgtgccttcacgcgggacggccacatggctgacaccctgctgctgctcctgctctacggctgggccatcatccccctcatgtacctgatgaacttcttcttcttgggggcggccactgcctacacgaggctgaccatcttcaacatcctgtcaggcatcgccaccttcctgatggtcaccatcatgcgcatcccagctgtaaaactggaagaactttccaaaaccctggatcacgtgttcctggtgctgcccaaccactgtctggggatggcagtcagcagtttctacgagaactacgagacgcggaggtactgcacctcctccgaggtcgccgcccactactgcaagaaatataacatccagtaccaggagaacttctatgcctggagcgccccgggggtcggccggtttgtggcctccatggccgcctcagggtgcgcctacctcatcctgctcttcctcatcgagaccaacctgcttcagagactcaggggcatcctctgcgccctccggaggaggcggacactgacagaattatacacccggatgcctgtgcttcctgaggaccaagatgtagcggacgagaggacccgcatcctggcccccagcccggactccctgctccacacacctctgattatcaaggagctctccaaggtgtacgagcagcgggtgcccctcctggccgtggacaggctctccctcgcggtgcagaaaggggagtgcttcggcctgctgggcttcaatggagccgggaagaccacgactttcaaaatgctgaccggggaggagagcctcacttctggggatgcctttgtcgggggtcacagaatcagctctgatgtcggaaaggtgcggcagcggatcggctactgcccgcagtttgatgccttgctggaccacatgacaggccgggagatgctggtcatgtacgctcggctccggggcatccctgagcgccacatcggggcctgcgtggagaacactctgcggggcctgctgctggagccacatgccaacaagctggtcaggacgtacagtggtggtaacaagcggaagctgagcaccggcatcgccctgatcggagagcctgctgtcatcttcctggacgagccgtccactggcatggaccccgtggcccggcgcctgctttgggacaccgtggcacgagcccgagagtctggcaaggccatcatcatcacctcccacagcatggaggagtgtgaggccctgtgcacccggctggccatcatggtgcaggggcagttcaagtgcctgggcagcccccagcacctcaagagcaagttcggcagcggctactccctgcgggccaaggtgcagagtgaagggcaacaggaggcgctggaggagttcaaggccttcgtggacctgacctttccaggcagcgtcctggaagatgagcaccaaggcatggtccattaccacctgccgggccgtgacctcagctgggcgaaggttttcggtattctggagaaagccaaggaaaagtacggcgtggacgactactccgtgagccagatctcgctggaacaggtcttcctgagcttcgcccacctgcagccgcccaccgcagaggaggggcgatgaggggtggcggctgtctcgccatcaggcagggacaggacgggcaagcagggcccatcttacatcctctctctccaagtttatctcatcctttatttttaatcacttttttctatgatggatatgaaaaattcaaggcagtatgcacagaatggacgagtgcagcccagccctcatgcccaggatcagcatgcgcatctccatgtctgcatactctggagttcactttcccagagctggggcaggccgggcagtctgcgggcaagctccggggtctctgggtggagagctgacccaggaagggctgcagctgagctgggggttgaatttctccaggcactccctggagagaggacccagtgacttgtccaagtttacacacgacactaatctcccctggggaggaagcgggaagccagccaggttgaactgtagcgaggcccccaggccgccaggaatggaccatgcagatcactgtcagtggagggaagctgctgactgtgattaggtgctggggtcttagcgtccagcgcagcccgggggcatcctggaggctctgctccttagggcatggtagtcaccgcgaagccgggcaccgtcccacagcatctcctagaagcagccggcacaggagggaaggtggccaggctcgaagcagtctctgtttccagcactgcaccctcaggaagtcgcccgccccaggacacgcagggaccaccctaagggctgggtggctgtctcaaggacacattgaatacgttgtgaccatccagaaaataaatgctgaggggacacag

SEQ ID NO: 16 - DNA, 1450 bp, Homo sapiens
  misc_feature: Incyte ID No: 2512879CB1
gatgcacttgagcagggaagaaatccacaaggactcaccagtctcctggtctgcagagaagacagaatcaacatgagcacagcaggaaaagtaatcaaatgcaaagcagctgtgctatgggagttaaagaaacccttttccattgaggaggtggaggttgcacctcctaaggcccatgaagttcgtattaagatggtggctgtaggaatctgtggcacagatgaccacgtggttagtggtaccatggtgaccccacttcctgtgattttaggccatgaggcagccggcatcgtggagagtgttggagaaggggtgactacagtcaaaccaggtgataaagtcatcccactcgctattcctcagtgtggaaaatgcagaatttgtaaaaacccggagagcaactactgcttgaaaaacgatgtaagcaatcctcaggggaccctgcaggatggcaccagcaggttcacctgcaggaggaagcccatccaccacttccttggcatcagcaccttctcacagtacacagtggtggatgaaaatgcagtagccaaaattgatgcagcctcgcctctagagaaagtctgtctcattggctgtggattttcaactggttatgggtctgcagtcaatgttgccaaggtcaccccaggctctacctgtgctgtgtttggcctgggaggggtcggcctatctgctattatgggctgtaaagcagctggggcagccagaatcattgcggtggacatcaacaaggacaaatttgcaaaggccaaagagttgggtgccactgaatgcatcaaccctcaagactacaagaaacccatccaggaggtgctaaaggaaatgactgatggaggtgtggatttttcatttgaagtcatcggtcggcttgacaccatgatggcttccctgttatgttgtcatgaggcatgtggcacaagtgtcatcgtaggggtacctcctgattcccaaaacctctcaatgaaccctatgctgctactgactggacgtacctggaagggagctattcttggtggctttaaaagtaaagaatgtgtcccaaaacttgtggctgattttatggctaagaagttttcattggatgcattaataacccatgttttaccttttgaaaaaataaatgaaggatttgacctgcttcactctgggaaaagtatccgtaccattctgatgttttgagacaatacagatgttttcccttgtggcagtcttcagcctcctctaccctacatgatctggagcaacagctgggaaatatcattaattctgctcatcacagattttatcaataaattacatttgggggctttccaaagaaatggaaattgatgtaaaattatttttcaagcaaatgtttaaaatccaaatgagaactaaataaagtgttgaacatcagctggggaattgaagcctataaaccttccttcta

SEQ ID NO: 17 - DNA, 5043 bp, Homo sapiens
  misc_feature: Incyte ID No: 241123.1
  unsure 2405, 5009, 5031: a, t, c, g, or other
ccaagggagaaaactattctgtcaaagagacggtgccaaaaggcaaaaacaaaggagctgatggcaaagaaggtagctgtgattggagctggggtcagtggcctaatttctctgaagtgctgtgtggatgagggacttgagcccacttgctttgagagaactgaagatattggaggagtgtggaggttcaaagagaatgtggaagatggccgagcaagtatctatcaatctgtcgttaccaacaccagcaaagaaatgtcctgtttcagtgactttccaatgcctgaagattttccaaacttcctgcataattctaaacttctggaatatttcaggatttttgctaaaaaatttgatctgctaaaatatattcagttccagacaactgtccttagtgtgagaaaatgtccagatttctcatcctctggccaatggaaggttgtcactcagagcaacggcaaggagcagagtgctgtctttgacgcagttatggtttgcagtggccaccacattctacctcatatcccactgaagtcatttccaggtatggagaggttcaaaggccaatatttccatagccgccaatacaagcatccagatggatttgagggaaaacgcatcctggtgattggaatgggaaactcaggctcagatattgctgttgagctgagtaagaatgctgctcaggtttttatcagcaccaggcatggcacctgggtcatgagccgtatctctgaagatggctatccttgggactcagtgttccacacccggtttcgttctatgctccgcaatgtactgccacgaacagctgtaaaatggatgatagaacaacagatgaatcggtggttcaaccatgaaaattatggccttgagcctcaaaacaaatacattatgaaggaacctgtactaaatgatgatgtcccaagtcgtctactctgtggagccatcaaggtgaaatctacagtgaaagagctcacagaaacttctgccatctttgaggatggaacagtggaggagaacattgatgtcatcatttttgcaacaggatatagtttctcttttcccttccttgaagattcactcgttaaagtagagaataatatggtctcactgtataaatacatattccccgctcacctggacaagtcaaccctcgcgtgcattggtctcatccagcccctaggttccattttcccaactgctgaacttcaagctcgttgggtgacaagagttttcaaaggcttgtgtagcctgccctcagagagaactatgatgatggacattatcaaaaggaatgaaaaaagaattgacctgtttggagaaagccagagccagacgttgcagaccaattatgttgactacttggacgagctcgccttagagataggtgcgaagccagatttctgctctctcttgttcaaagatcctaaactggctgtgagactctatttcggaccctgcaactcctattagtatcgcctggttgggcctgggcaatgggaaggagccagaaatgccatcttcacccagaaacaaagaatactgaagccactcaagactcgggccctgaaggattcatctaatttctcagtttcttttctgttgaaaatcctgggccttcttgctgttgttgtggcctttttttgccaacttcaatggtcctagtcagcataatgctttgggctttattatcttgtcagtcactacctcctaaagaaaaaaaaaaaggctagaagaaaaaacattacattcatgttctaattatagattttagagttaggtagtacaggtaagggggaaattgtaaagaattagcagaattaggcatatgtacaaaaccaaaattttgtcatgaaattttgcctttccacgcttccctcagttcaccaaagttaccaaaatgtaaaataaaataagactggctcaggtaagtagtgctgccaaccctgatataggggagttgtatggaaaaatagtagaattacacagcatgaaaagcagcccatggtttaaattattggacaatttaaattgtgggtaaatatttaaaactcctgaacaatgtttctgatggtcttctatccaccctacttggtaacaaagttctcagatgttaggtcatgtttcatttgctcagtcggggatcactcaaaactactagacaaaaaagtgagaggatagatttagaaaacatcagtgatgctcagataaacttttaggacctcatattaagagctaagcaaatggccacatttcctatattttgacagagatactgctggaaaaattaaaattaaaatgccataatagctacctaacaaatatatatgtttaatgtttatcataggccagacattgtgctatgtgcatatcatatgtattatttcatttaattcctcacnacaattctgtgaaatggttacagctattatagtcatttcacagatgatgaaactaagattcagagcagctgatcttgtgaggcagctggaattggaactcagatttgttgaactctagaactaaagatcataatgttgtcttgtaatatatttatttacaaaacacttcattatttataaagaatttactaacagtttatcttatttatacccatacatctgctactttgggaggccctttacatagaaaacagcattctttttgccaaatatgaccaaattacttttatttataatttttgatttatatttcagctagatctaaaaagcatctgaaggaatttacaatgaaagatacctatgcaataacatttaggataatctttgacattttggaaaaataagaattgaggaaaaaaagtgtatctttcaagtagatgcaaagcattataatgactgacacttgtatctaactccagtcttacagataactaaggcaaaaagctaaataaacaatatgtaacctctaacatttggtaaaaggaagtatactggtctgttagcagagacaaactttttttagaattgaagtctgaaacaaacaaaagcaattcaatgtcaatagacattaagcaacataatagacaaacatctcctaagggaacatttgttacagctgctccttccctgaactgtgctttggaagataagctctgtcctgagtccaaaccaagcccttccaagagagaacaaaggtcagagatgttgaagattccagcaaatttctcctcttatttctaccaagcctttgtgaacattgctcttcattttggcctgtacttctccctcagggacgtagaacaatggaatgtcagtcagtctctgtagttaaaactttttctttaaaattcaattaaggtacttctccctcagggacgtagaacaatggaatgtcagtcagtctctgtagttaaaactttttctttaaaattcaattaagttacaccagaatttacaggcaagattttttttttcattgctcccataagcaaatttgttttaaaataattgtaaatgaggtatatacttagttcttggttaaaaaatatattgctttgttaagtattaaagattatttgtaagtcattgtattaataatactaataaaatttatcaagcctttatagcaagggtcagtgaattaccactgcctgtgggccaaatctagctcactatctgtttttgtaaataaaattttataatagtacacagccacactcattcatttattttctgtggttgctttcaagctacaattgtagagttgggtagtcgcaacagaatctctgtggcccacaaggctaaaatatttacattctcacccattacagaaaaagtttgataattcctgctttataatatgtaaggcattgtcccattttgcataacttgccttatttcatcattatcactacccatttagtagctatggttgttatcttacttctacagtggaagagattgaaaagcatttgtcaggttaatgctaaatcagtgcggaaatatagctccactaggaaaatattattaaatttatatccctaaaatttttagaaatctctcaaaatctttccaaatgttctggtatctttgaaaaatgtaaatagtttatttatagagaaccctacctctgaggttgactcaaaggttaaagaaggctcatcagtctatccttctgcctccatatatcctgaacatcaaactatcccaggaaaaccatctagagtagtttgtttcaaaatattagccacagaccacctacatcacaataactcagggagcttatagaagtgaagattcctgaatataaacatagtaataattcaacctactgaatggaaatctctgctgaaatccacagttttcataagctccccagatgattcctgtgtacattaaatctagaaaccattagtttgagatctctcaaaaataaaaataaaaattgctttcagagagtagcccatgaaatttcccattcttcaaggacaaattccttctgttcagccttggtcctccaactgcagtttacaatttttgttcttctcctgtaaagaatgtcaatggttatcaccttcaatagtttcaatatgtcccccaaagttatgtgtttgaaacttgcaatagtattgggagatggggcctaatgaggtgattaggtgaagtctctgccctcatgaaaagattaatcccattatctcaggagtgtgttggttataaaagcaagtttggctccctcttttcctcacacactctttttcccttctgccttcacctttgccgtgggtggacacagcaagaaggccctcatcagatgctggccccttggtcttgaatttcctagcctctacaactaagccaaataaatttctgtttattataaataacccagtctcagatattctgttacagaaacacaaaatggactaagacaccacccttttccaaaatctctccttgtgatggctccctttactaacctttcttttagctattccctttatgatagtttcttaattttttctatcaaaagctaaatatggnacacttgttctttacagaaaantaaagatatttt

SEQ ID NO: 18 - DNA, 5832 bp, Homo sapiens
  misc_feature: Incyte ID No: 247817.4
actgagtcccgggaccccgggagagcggtcagtgtgtggtcgctgcgtttcctctgcctgcgccgggcatcacttgcgcgccgcagaaagtccgtctggcagcctggatatcctctcctaccggcacccgcagacgcccctgcagccgcggtcggcgcccgggctccctagccctgtgcgctcaactgtcctgcgctgcggggtgccgcgagttccacctccgcgcctccttctctagacaggcgctgggagaaagaaccggctcccgagttctgggcatttcgcccggctcgaggtgcaggatgcagagcaaggtgctgctggccgtcgccctgtggctctgcgtggagacccgggccgcctctgtgggtttgcctagtgtttctcttgatctgcccaggctcagcatacaaaaagacatacttacaattaaggctaatacaactcttcaaattacttgcaggggacagagggacttggactggctttggcccaataatcagagtggcagtgagcaaagggtggaggtgactgagtgcagcgatggcctcttctgtaagacactcacaattccaaaagtgatcggaaatgacactggagcctacaagtgcttctaccgggaaactgacttggcctcggtcatttatgtctatgttcaagattacagatctccatttattgcttctgttagtgaccaacatggagtcgtgtacattactgagaacaaaaacaaaactgtggtgattccatgtctcgggtccatttcaaatctcaacgtgtcactttgtgcaagatacccagaaaagagatttgttcctgatggtaacagaatttcctgggacagcaagaagggctttactattcccagctacatgatcagctatgctggcatggtcttctgtgaagcaaaaattaatgatgaaagttaccagtctattatgtacatagttgtcgttgtagggtataggatttatgatgtggttctgagtccgtctcatggaattgaactatctgttggagaaaagcttgtcttaaattgtacagcaagaactgaactaaatgtggggattgacttcaactgggaatacccttcttcgaagcatcagcataagaaacttgtaaaccgagacctaaaaacccagtctgggagtgagatgaagaaatttttgagcaccttaactatagatggtgtaacccggagtgaccaaggattgtacacctgtgcagcatccagtgggctgatgaccaagaagaacagcacatttgtcagggtccatgaaaaaccttttgttgcttttggaagtggcatggaatctctggtggaagccacggtgggggagcgtgtcagaatccctgcgaagtaccttggttacccacccccagaaataaaatggtataaaaatggaataccccttgagtccaatcacacaattaaagcggggcatgtactgacgattatggaagtgagtgaaagagacacaggaaattacactgtcatccttaccaatcccatttcaaaggagaagcagagccatgtggtctctctggttgtgtatgtcccaccccagattggtgagaaatctctaatctctcctgtggattcctaccagtacggcaccactcaaacgctgacatgtacggtctatgccattcctcccccgcatcacatccactggtattggcagttggaggaagagtgcgccaacgagcccagccaagctgtctcagtgacaaacccatacccttgtgaagaatggagaagtgtggaggacttccagggaggaaataaaattgaagttaataaaaatcaatttgctctaattgaaggaaaaaacaaaactgtaagtacccttgttatccaagcggcaaatgtgtcagctttgtacaaatgtgaagcggtcaacaaagtcgggagaggagagagggtgatctccttccacgtgaccaggggtcctgaaattactttgcaacctgacatgcagcccactgagcaggagagcgtgtctttgtggtgcactgcagacagatctacgtttgagaacctcacatggtacaagcttggcccacagcctctgccaatccatgtgggagagttgcccacacctgtttgcaagaacttggatactctttggaaattgaatgccaccatgttctctaatagcacaaatgacattttgatcatggagcttaagaatgcatccttgcaggaccaaggagactatgtctgccttgctcaagacaggaagaccaagaaaagacattgcgtggtcaggcagctcacagtcctagagcgtgtggcacccacgatcacaggaaacctggagaatcagacgacaagtattggggaaagcatcgaagtctcatgcacggcatctgggaattccccctccacagatcatgtggtttaaagataatgagacccttgtagaagactcaggcattgtattgaaggatgggaaccggaacctcactatccgcagagtgaggaaggaggacgaaggcctctacacctgccaggcatgcagtgttcttggctgtgcaaaagtggaggcatttttcataatagaaggtgcccaggaaaagacgaacttggaaatcattattctagtaggcacggcggtgattgccatgttcttctggctacttcttgtcatcatcctacggaccgttaagcgggccaatggaggggaactgaagacaggctacttgtccatcgtcatggatccagatgaactcccattggatgaacattgtgaacgactgccttatgatgccagcaaatgggaattccccagagaccggctgaagctaggtaagcctcttggccgtggtgcctttgcccaagtgattgaagcagatgcctttggaattgacaagacagcaacttgcaggacagtagcagtcaaaatgttgaaagaaggagcaacacacagtgagcatcgagctctcatgtctgaactcaagatcctcattcatattggtcaccatctcaatgtggtcaaccttctaggtgcctgtaccaagccaggagggccactcatggtgattgtggaattctgcaaatttggaaacctgtccacttacctgaggagcaagagaaatgaatttgtcccctacaagaccaaaggggcacgattccgtcaagggaaagactacgttggagcaatccctgtggatctgaaacggcgcttggacagcatcaccagtagccagagctcagccagctctggatttgtggaggagaagtccctcagtgatgtagaagaagaggaagctcctgaagatctgtataaggacttcctgaccttggagcatctcatctgttacagcttccaagtggctaagggcatggagttcttggcatcgcgaaagtgtatccacagggacctggcggcacgaaatatcctcttatcggagaagaacgtggttaaaatctgtgactttggcttggcccgggatatttataaagatccagattatgtcagaaaaggagatgctcgcctccctttgaaatggatggccccagaaacaatttttgacagagtgtacacaatccagagtgacgtctggtcttttggtgttttgctgtgggaaatattttccttaggtgcttctccatatcctggggtaaagattgatgaagaattttgtaggcgattgaaagaaggaactagaatgagggcccctgattatactacaccagaaatgtaccagaccatgctggactgctggcacggggagcccagtcagagacccacgttttcagagttggtggaacatttgggaaatctcttgcaagctaatgctcagcaggatggcaaagactacattgttcttccgatatcagagactttgagcatggaagaggattctggactctctctgcctacctcacctgtttcctgtatggaggaggaggaagtatgtgaccccaaattccattatgacaacacagcaggaatcagtcagtatctgcagaacagtaagcgaaagagccggcctgtgagtgtaaaaacatttgaagatatcccgttagaagaaccagaagtaaaagtaatcccagatgacaaccagacggacagtggtatggttcttgcctcagaagagctgaaaactttggaagacagaaccaaattatctccatcttttggtggaatggtgcccagcaaaagcagggagtctgtggcatctgaaggctcaaaccagacaagcggctaccagtccggatatcactccgatgacacagacaccaccgtgtactccagtgaggaagcagaacttttaaagctgatagagattggagtgcaaaccggtagcacagcccagattctccagcctgactcggggaccacactgagctctcctcctgtttaaaaggaagcatccacacccccaactcccggacatcacatgagaggtgctgctcagattttcaagtgttgttctttccaccagcaggaagtagccgcatttgattttcatttcgacaacagaaaaaggacctcggactgcagggagccagtcttctaggcatatcctggaagaggcttgtgacccaagaatgtgtctgtgtcttctcccagtgttgacctgatcctctttttcattcatttaaaaagcatttatcatgccccctgctgcgggtctcaccatgggtttagaacaaagacgttcaagaaatggccccatcctcaaagaagtagcagtacctggggagctgacacttctgtaaaactagaagataaaccaggcaatgtaagtgttcgaggtgttgaagatgggaaggatttgcagggctgagtctatccaagaggctttgtttaggacgtgggtcccaagccaagccttaagtgtggaattcggattgatagaaaggaagactaacgttaccttgctttggagagtactggagcctgcaaatgcattgtgtttgctctggtggaggtgggcatggggtctgttctgaaatgtaaagggttcagacggggtttctggttttagaaggttgcgtgttcttcgagttgggctaaagtagagttcgttgtgctgtttctgactcctaatgagagttccttccagaccgttacgtgtctcctggccaagccccaggaaggaaatgatgcagctctggctccttgtctcccaggctgatcctttattcagaataccacaaagaaaggacattcagctcaaggctccctgccgtgttgaagagttctgactgcacaaaccagcttctggtttcttctggaatgaataccctcatatctgtcctgatgtgatatgtctgagactgaatgcgggaggttcaatgtgaagctgtgtgtggtgtcaaagtttcaggaaggattttacccttttgttcttccccctgtccccaacccactctcaccccgcaacccatcagtattttagttatttggcctctactccagtaaacctgattgggtttgttcactctctgaatgattattagccagacttcaaaattattttatagcccaaattataacatctattgtattatttagacttttaacatatagagctatttctactgatttttgcccttgttctgtcctttttttcaaaaaagaaaatgtgttttttgtttggtaccatagtgtgaaatgctgggaacaatgactataagacatgctatggcacatatatttatagtctgtttatgtagaaacaaatgtaatatattaaagccttatatataatgaactttgtactattcacattttgtatcagtattatgtagcataacaaaggtcataatgctttcagcaattgatgtcattttattaaagaacattgaaaaacttg

SEQ ID NO: 19 - DNA, 4892 bp, Homo sapiens
  misc_feature: Incyte ID No: 1674368CB1
attaggtggagaggcagttggggggcctcgttgttttgcgtcttagttccgccctcctgtccatcaggagaaggaaaggataaaccctgggccatgaggctacccctgctcctggtttttgcctctgtcattccgggtgctgttctcctactggacaccaggcaatttttaatctataatgaagatcacaagcgctgcgtggatgcagtgagtcccagtgccgtccaaaccgcagcttgcaaccaggatgccgaatcacagaaattccgatgggtgtccgaatctcagattatgagtgttgcatttaaattatgcctgggagtgccatcaaaaacagactgggttgctatcactctctatgcctgtgactcaaaaagtgaatttcagaaatgggagtgcaaaaatgacacacttttggggatcaaaggagaagatttattttttaactacggcaacagacaagaaaagaatattatgctctacaagggatcgggtttatggagcaggtggaagatctatggaaccacagacaatctgtgctccagaggttatgaagccatgtatacgctactaggcaatgccaatggagcaacctgtgcattcccgttcaagtttgaaaacaagtggtacgcagattgcacgagtgctgggcggtcggatggatggctctggtgcggaaccactactgactatgacacagacaagctatttggatattgtccattgaaatttgagggcagtgaaagcttatggaataaagacccgctgaccagcgtttcctaccagataaactccaaatccgctttaacgtggcaccaagcgaggaaaagctgccaacaacagaacgctgagctcctgagcatcacagagatacatgagcaaacatacctgacaggattaaccagttccttgacctcaggactctggattggacttaacagtctgagcttcaacagcggttggcagtggagtgaccgcagtcctttccgatatttgaactggttaccaggaagtccatcagctgaacctggaaaaagctgtgtgtcactaaatcctggaaaaaatgctaaatgggaaaatctggaatgtgttcagaaactgggctatatttgcaaaaagggcaacaccactttaaattcttttgttattccctcagaaagtgatgtgcctactcactgtcctagtcagtggtggccgtatgccggtcactgttacaagattcacagagatgagaaaaaaatccagagggatgctctgaccacctgcaggaaggaaggcggtgacctcacaagtatccacaccatcgaggaattggactttattatctcccagctaggatatgagccaaatgacgaattgtggatcggcttaaatgacattaagattcaaatgtactttgagtggagtgatgggacccctgtaacgtttaccaaatggcttcgtggagaaccaagccatgaaaacaacagacaggaggattgtgtggtgatgaaaggcaaggatgggtactgggcagatcggggctgtgagtggcctcttggctacatctgcaagatgaaatcacgaagccaaggtccagaaatagtggaagtcgaaaaaggctgcaggaaaggctggaaaaaacatcacttttactgctatatgattggacatacgctttcaacatttgcagaagcaaaccaaacctgtaataatgagaatgcttatttaacaactattgaagacagatatgaacaagccttcctgactagtttcgttggcttaaggcctgaaaaatatttctggacaggactttcagatatacaaaccaaagggacttttcagtggaccatcgaggaagaggttcggttcacccactggaattcagatatgccagggcgaaagccagggtgtgttgccatgagaaccgggattgcagggggcttatgggatgttttgaaatgtgatgaaaaggcaaaatttgtgtgcaagcactgggcagaaggagtaacccacccaccgaagcccacgacgactcccgaacccaaatgtccggaggattggggcgccagcagtagaacaagcttgtgtttcaagctgtatgcaaaaggaaaacatgagaagaaaacgtggtttgaatctcgagatttttgtcgagctctgggtggagacttagctagcatcaataacaaagaggaacagcaaacaatatggcgattaataacagctagtggaagctaccacaaactgttttggttgggattgacatatggaagcccttcagaaggttttacttggagtgatggttctcctgtttcatatgaaaactgggcttatggagaacctaataattatcaaaatgttgaatactgtggtgagctgaaaggtgaccctactatgtcttggaatgatattaattgtgaacaccttaacaactggatttgccagatacaaaaaggacaaacaccaaaacctgagccaacaccagctcctcaagacaatccaccagttactgaagatgggtgggttatttacaaagactaccagtattatttcagcaaagagaaggaaaccatggacaatgcgcgagcgttttgcaagaggaattttggtgatcttgtttctattcaaagtgaaagtgaaaagaagtttctatggaaatatgtaaacagaaatgatgcacagtctgcatattttattggtttattgatcagcttggataaaaagtttgcttggatggatggaagcaaagtggattacgtgtcttgggccacaggtgaacccaattttgcaaatgaagatgaaaactgtgtgaccatgtattcaaattcagggttttggaatgacattaactgtggctatccaaacgccttcatttgccagcgacataacagtagtatcaatgctaccacagttatgcctaccatgccctcggtcccatcagggtgcaaggaaggttggaatttctacagcaacaagtgtttcaaaatctttggatttatggaagaagaaagaaaaaattggcaagaggcacgaaaagcttgtataggctttggagggaatctggtctccatacaaaatgaaaaagagcaagcatttcttacctatcacatgaaggactccactttcagtgcctggactgggctgaatgatgtcaattcagaacacacgttcctttggacggatggacgaggagtccattacacaaactgggggaaaggttaccctggtggaagaagaagcagtctttcttatgaagatgctgactgtgttgttattattggaggtgcatcaaatgaagcaggaaaatggatggatgatacctgcgacagtaaacgaggctacatatgccagacacgatccgacccttccttgactaatcctccagcaacgattcaaacagatggctttgttaaatatggcaaaagcagctattcactcatgagacaaaaatttcaatggcatgaagcggagacatactgcaagcttcacaattcccttatagccagcattctggatccctacagtaatgcatttgcgtggctgcagatggaaacatctaatgaacgtgtgtggatcgccctgaacagtaacttgactgataatcaatacacttggactgataagtggagggtgaggtacactaactgggctgctgatgagcccaaattgaaatcagcatgtgtttatctggatcttgatggctactggaagacagcacattgcaatgaaagtttttactttctctgtaaaagatcagatgaaatccctgctactgaacccccacaactgcctggcagatgcccggagtcagatcacacagcatggattcctttccatggtcactgttactatattgagtcctcatatacaagaaactggggccaagcttctctggaatgtcttcgaatgggttcctctctggtttccattgaaagtgctgcagaatccagttttctgtcatatcgggttgagccacttaaaagtaaaaccaatttttggataggattgttcagaaatgttgaagggacgtggctgtggataaataacagtccggtctcctttgtcaactggaacacaggagatccctctggtgaacggaatgattgtgtagctttacatgcgtcttctgggttttggagtaatattcactgttcttcctacaaaggatatatttgtaaaagaccaaaaattattgatgctaaacctactcatgaattacttacaacaaaagctgacacaaggaagatggacccttctaaaccgtcttccaacgtggccggagtagtcatcattgtgatcctcctgattttaacgggtgctggccttgccgcctatttcttttataagaaaagacgtgtgcacctacctcaagagggcgcctttgaaaacactctgtattttaacagtcagtcaagcccaggaactagtgatatgaaagatctcgtgggcaatattgaacagaatgaacactcggtcatctagtacctcaatgcgattctgagatatttgaatttcataaaattgtaactgaaatttaaaatttttagttcaatgtgattgttttctttaaaatgagtactgaattgtactggtctgtccttttttcctttgcctaattgaagaaataattgcttgttttctagcctggcaagatattttcataaaagagggataacaatgctgattactaccttttaaaatattttagataaatgcacagcaccacagcaccacatctaagcattagtgatgggtagctgatgtcagcttcatgtggattttaagcactctagaaacaatgaagcttcttggcatattttaaggagctcccaaaatgtgttacctattaaattgtaactcagcaagtagaagaccatttgaaaagtcgggaacaaattcctaagggggtt

SEQ ID NO: 20 - DNA, 4206 bp, Homo sapiens
  misc_feature: Incyte ID No: 343963.1
ggcagaggggtctagaatatgtacacgcagctgactcaggcaggctccatgctgaacggtcacacagagaggaaacaataaatctcagctactatgcaataaatatctcaagttttaacgaagaaaaacatcattgcagtgaaataaaaaattttaaaattttagaacaaagctaacaaatggctagttttctatgattcttcttcaaacgctttctttgagggggaaagagtcaaacaaacaagcagttttacctgaaataaagaactagttttagaggtcagaagaaaggagcaagttttgcgagaggcacggaaggagtgtgctggcagtacaatgacagttttcctttcctttgctttcctcgctgccattctgactcacatagggtgcagcaatcagcgccgaagtccagaaaacagtgggagaagatataaccggattcaacatgggcaatgtgcctacactttcattcttccagaacacgatggcaactgtcgtgagagtacgacagaccagtacaacacaaacgctctgcagagagatgctccacacgtggaaccggatttctcttcccagaaacttcaacatctggaacatgtgatggaaaattatactcagtggctgcaaaaacttgagaattacattgtggaaaacatgaagtcggagatggcccagatacagcagaatgcagttcagaaccacacggctaccatgctggagataggaaccagcctcctctctcagactgcagagcagaccagaaagctgacagatgttgagacccaggtactaaatcaaacttctcgacttgagatacagctgctggagaattcattatccacctacaagctagagaagcaacttcttcaacagacaaatgaaatcttgaagatccatgaaaaaaacagtttattagaacataaaatcttagaaatggaaggaaaacacaaggaagagttggacaccttaaaggaagagaaagagaaccttcaaggcttggttactcgtcaaacatatataatccaggagctggaaaagcaattaaacagagctaccaccaacaacagtgtccttcagaagcagcaactggagctgatggacacagtccacaaccttgtcaatctttgcactaaagaaggtgttttactaaagggaggaaaaagagaggaagagaaaccatttagagactgtgcagatgtatatcaagctggttttaataaaagtggaatctacactatttatattaataatatgccagaacccaaaaaggtgttttgcaatatggatgtcaatgggggaggttggactgtaatacaacatcgtgaagatggaagtctagatttccaaagaggctggaaggaatataaaatgggttttggaaatccctccggtgaatattggctggggaatgagtttatttttgccattaccagtcagaggcagtacatgctaagaattgagttaatggactgggaagggaaccgagcctattcacagtatgacagattccacataggaaatgaaaagcaaaactataggttgtatttaaaaggtcacactgggacagcaggaaaacagagcagcctgatcttacacggtgctgatttcagcactaaagatgctgataatgacaactgtatgtgcaaatgtgccctcatgttaacaggaggatggtggtttgatgcttgtggcccctccaatctaaatggaatgttctatactgcgggacaaaaccatggaaaactgaatgggataaagtggcactacttcaaagggcccagttactccttacgttccacaactatgatgattcgacctttagatttttgaaagcgcaatgtcagaagcgattatgaaagcaacaaagaaatccggagaagctgccaggtgagaaactgtttgaaaacttcagaagcaaacaatattgtctcccttccagcaataagtggtagttatgtgaagtcaccaaggttcttgaccgtgaatctggagccgtttgagttcacaagagtctctacttggggtgacagtgctcacgtggctcgactatagaaaactccactgactgtcgggctttaaaaagggaagaaactgctgagcttgctgtgcttcaaactactactggaccttattttggaactatggtagccagatgataaatatggttaatttcatgtaaaacagaaaaaaagagtgaaaaagagaatatacatgaagaatagaaacaagcctgccataatcctttggaaaagatgtattataccagtgaaaaggtgttatatctatgcaaacctactaacaaattatactgttgcacaattttgataaaaatttagaacagcattgtcctctgagttggttaaatgttaatggatttcagaagcctaattccagtatcatacttactagttgatttctgcttacccatcttcaaatgaaaattccatttttgtaagccataatgaactgtagtacatggacaataagtgtgtggtagaaacaaactccattactctgatttttgatacagttttcagaaaaagaaatgaacataatcaagtaaggatgtatgtggtgaaaacttaccacccccatactatggttttcatttactctaaaaactgattgaatgatatataaatatatttatagcctgagtaaagttaaaagaatgtaaaatatatcatcaagttcttaaaataatatacatgcatttaatatttcctttgatattatacaggaaagcaatattttggagtatgttaagttgaagtaaaaccaagtactctggagcagttcattttacagtatctacttgcatgtgtatacatacatgtaacttcattattttaaaaatatttttagaactccaatactcaccctgttatgtcttgctaatttaaattttgctaattaactgaaacatgcttaccagattcacactgttccagtgtctataaaagaaacactttgaagtctataaaaaataaaataattataaatatcattgtacatagcatgtttatatctgcaaaaaacctaatagctaattaatctggaatatgcaacattgtccttaattgatgcaaataacacaaatgctcaaagaaatctactatatcccttaatgaaatacatcattcttcatatatttctccttcagtccattcccttaggcaatttttaatttttaaaaatttttctcccctgataataattggcaaaactattatatgtaagggaaatatatacaaaaagaaaattaatcatagtcacctgactaagaaattctgactgctagttgccataaataactcaatggaaatattcctatgggataatgtattttaagtgaatttttggggtgcttgaagttactgcattattttatcaagaagtcttctctgcctgtaagtgtccaaggttatgacagtaaacagtttttattaaaacatgagtcactatgggatgagaaaattgaaataaagctactgggcctcctctcataaaagagacagttgttggcaaggtagcaataccagtttcaaacttggtgacttgatccactatgccttaatggtttcctccatttgagaaaataaagctattcacattgttaagaaaaatactttttaaagtttaccatcaagtcttttttatatttatgtgtctgtattctacccctttttgccttacaagtgatatttgcaggtattataccatttttctattcttggtggcttcttcatagcaggtaagcctctccttctaaaaacttctcaactgttttcatttaagggaaagaaaatgagtattttgtccttttgtgttcctacagacactttcttaaaccagtttttggataaagaatactatttccaaactcatattacaaaaacaaaataaaataataaaaaaagaaagcatgatatttactgttttgttgtctgggtttgagaaatgaaatattgtttccaattatttataataaatcagtataaaatgttttatgattgttatgtgtattatgtaatacgtacatgtttatggcaatttaacatgtgtattcttttcatttaattgtttcagaataggataattaggtattccaattttgtctttaaaattcatgtggtttctatgcaaagttcttcatatcatcacaacattatttgatttaaataaaattgaaagtaataaaaa

SEQ ID NO: 21 - DNA, 4769 bp, Homo sapiens
  misc_feature: Incyte ID No: 273154CB1
ggattctatttagcccgccaggaattaaccttgactataaataggccatcaatgacctttccagagaatgttcagagacctcaactttgtttagagatcttgtgtgggtggaacttcctgtttgcacacagagcagcataaagcccagttgctttgggaagtgtttgggaccagatggattgtagggagtagggtacaatacagtctggtctcctccagctccttctttctgcaacatggggaagaacaaactccttcatccaagtctggttcttctcctcttggtcctcctgcccacagacgcctcagtctctggaaaaccgcagtatatggttctggtcccctccctgctccacactgagaccactgagaagggctgtgtccttctgagctacctgaatgagacagtgactgtaagtgcttccttggagtctgtcaggggaaacaggagcctcttcactgacctggaggcggagaatgacgtactccactgtgtcgccttcgctgtcccaaagtcttcatccaatgaggaggtaatgttcctcactgtccaagtgaaaggaccaacccaagaatttaagaagcggaccacagtgatggttaagaacgaggacagtctggtctttgtccagacagacaaatcaatctacaaaccagggcagacagtgaaatttcgtgttgtctccatggatgaaaactttcaccccctgaatgagttgattccactagtatacattcaggatcccaaaggaaatcgcatcgcacaatggcagagtttccagttagagggtggcctcaagcaattttcttttcccctctcatcagagcccttccagggctcctacaaggtggtggtacagaagaaatcaggtggaaggacagagcaccctttcaccgtggaggaatttgttcttcccaagtttgaagtacaagtaacagtgccaaagataatcaccatcttggaagaagagatgaatgtatcagtgtgtggcctatacacatatgggaagcctgtccctggacatgtgactgtgagcatttgcagaaagtatagtgacgcttccgactgccacggtgaagattcacaggctttctgtgagaaattcagtggacagctaaacagccatggctgcttctatcagcaagtaaaaaccaaggtcttccagctgaagaggaaggagtatgaaatgaaacttcacactgaggcccagatccaagaagaaggaacagtggtggaattgactggaaggcagtccagtgaaatcacaagaaccataaccaaactctcatttgtgaaagtggactcacactttcgacagggaattcccttctttgggcaggtgcgcctagtagatgggaaaggcgtccctataccaaataaagtcatattcatcagaggaaatgaagcaaactattactccaatgctaccacggatgagcatggccttgtacagttctctatcaacaccaccaatgttatgggtacctctcttactgttagggtcaattacaaggatcgtagtccctgttacggctaccagtgggtgtcagaagaacacgaagaggcacatcacactgcttatcttgtgttctccccaagcaagagctttgtccaccttgagcccatgtctcatgaactaccctgtggccatactcagacagtccaggcacattatattctgaatggaggcaccctgctggggctgaagaagctctccttctattatctgataatggcaaagggaggcattgtccgaactgggactcatggactgcttgtgaagcaggaagacatgaagggccatttttccatctcaatccctgtgaagtcagacattgctcctgtcgctcggttgctcatctatgctgttttacctaccggggacgtgattggggattctgcaaaatatgatgttgaaaattgtctggccaacaaggtggatttgagcttcagcccatcacaaagtctcccagcctcacacgcccacctgcgagtcacagcggctcctcagtccgtctgcgccctccgtgctgtggaccaaagcgtgctgctcatgaagcctgatgctgagctctcggcgtcctcggtttacaacctgctaccagaaaaggacctcactggcttccctgggcctttgaatgaccaggacgatgaagactgcatcaatcgtcataatgtctatattaatggaatcacatatactccagtatcaagtacaaatgaaaaggatatgtacagcttcctagaggacatgggcttaaaggcattcaccaactcaaagattcgtaaacccaaaatgtgtccacagcttcaacagtatgaaatgcatggacctgaaggtctacgtgtaggtttttatgagtcagatgtaatgggaagaggccatgcacgcctggtgcatgttgaagagcctcacacggagaccgtacgaaagtacttccctgagacatggatctgggatttggtggtggtaaactcagcaggtgtggctgaggtaggagtaacagtccctgacaccatcaccgagtggaaggcaggggccttctgcctgtctgaagatgctggacttggtatctcttccactgcctctctccgagccttccagcccttctttgtggagctcacaatgccttactctgtgattcgtggagaggccttcacactcaaggccacggtcctaaactaccttcccaaatgcatccgggtcagtgtgcagctggaagcctctcccgccttcctagctgtcccagtggagaaggaacaagcgcctcactgcatctgtgcaaacgggcggcaaactgtgtcctgggcagtaaccccaaagtcattaggaaatgtgaatttcactgtgagcgcagaggcactagagtctcaagagctgtgtgggactgaggtgccttcagttcctgaacacggaaggaaagacacagtcatcaagcctctgttggttgaacctgaaggactagagaaggaaacaacattcaactccctactttgtccatcaggtggtgaggtttctgaagaattatccctgaaactgccaccaaatgtggtagaagaatctgcccgagcttctgtctcagttttgggagacatattaggctctgccatgcaaaacacacaaaatcttctccagatgccctatggctgtggagagcagaatatggtcctctttgctcctaacatctatgtactggattatctaaatgaaacacagcagcttactccagagatcaagtccaaggccattggctatctcaacactggttaccagagacagttgaactacaaacactatgatggctcctacagcacctttggggagcgatatggcaggaaccagggcaacacctggctcacagcctttgttctgaagacttttgcccaagctcgagcctacatcttcatcgatgaagcacacattacccaagccctcatatggctctcccagaggcagaaggacaatggctgtttcaggagctctgggtcactgctcaacaatgccataaagggaggagtagaagatgaagtgaccctctccgcctatatcaccatcgcccttctggagattcctctcacagtcactcaccctgttgtccgcaatgccctgttttgcctggagtcagcctggaagacagcacaagaaggggaccatggcagccatgtatataccaaagcactgctggcctatgcttttgccctggcaggtaaccaggacaagaggaaggaagtactcaagtcacttaatgaggaagctgtgaagaaagacaactctgtccattgggagcgccctcagaaacccaaggcaccagtggggcatttttacgaaccccaggctccctctgctgaggtggagatgacatcctatgtgctcctcgcttatctcacggcccagccagccccaacctcggaggacctgacctctgcaaccaacatcgtgaagtggatcacgaagcagcagaatgcccagggcggtttctcctccacccaggacacagtggtggctctccatgctctgtccaaatatggagcagccacatttaccaggactgggaaggctgcacaggtgactatccagtcttcagggacattttccagcaaattccaagtggacaacaacaaccgcctgttactgcagcaggtctcattgccagagctgcctggggaatacagcatgaaagtgacaggagaaggatgtgtctacctccagacatccttgaaatacaatattctcccagaaaaggaagagttcccctttgctttaggagtgcagactctgcctcaaacttgtgatgaacccaaagcccacaccagcttccaaatctccctaagtgtcagttacacagggagccgctctgcctccaacatggcgatcgttgatgtgaagatggtctctggcttcattcccctgaagccaacagtgaaaatgcttgaaagatctaaccatgtgagccggacagaagtcagcagcaaccatgtcttgatttaccttgataaggtgtcaaatcagacactgagcttgttcttcacggttctgcaagatgtcccagtaagagatctgaaaccagccatagtgaaagtctatgattactacgagacggatgagtttgcaattgctgagtacaatgctccttgcagcaaagatcttggaaatgcttgaagaccacaaggctgaaaagtgctttgctggagtcctgttctcagagctccacagaagacacgtgtttttgtatctttaaagacttgatgaataaacactttttctgtc

SEQ ID NO: 22 - DNA, 4135 bp, Homo sapiens
  misc_feature: Incyte ID No: 331508.4
caggcctccctcgccagcggggtgtggctcccctccaaagacggtcggctgacaggctccacagagctccactcacgctcagccctggacggacaggcagtccaacggaacagaaacatccctcagcccacaggcacgatctgttcctcctgggaagatgcagaggctcatgatgctcctcgccacatcgggcgcctgcctgggcctgctggcagtggcagcagtggcagcagcaggtgctaaccctgcccaacgggacacccacagcctgctgcccacccaccggcgccaaaagagagattggatttggaaccagatgcacattgatgaagagaaaaacacctcacttccccatcatgtaggcaagatcaagtcaagcgtgagtcgcaagaatgccaagtacctgctcaaaggagaatatgtgggcaaggtcttccgggtcgatgcagagacaggagacgtgttcgccattgagaggctggaccgggagaatatctcagagtaccacctcactgctgtcattgtggacaaggacactggtgaaaacctggagactccttccagcttcaccatcaaagttcatgacgtgaacgacaactggcctgtgttcacgcatcggttgttcaatgcgtccgtgcctgagtcgtcggctgtggggacctcagtcatctctgtgacagcagtggatgcagacgaccccactgtgggagaccacgcctctgtcatgtaccaaatcctgaaggggaaagagtattttgccatcgataattctggacgtattatcacaataacgaaaagcttggaccgagagaagcaggccaggtatgagatcgtggtggaagcgcgagatgcccagggcctccggggggactcgggcacggccaccgtgctggtcactctgcaagacatcaatgacaacttccccttcttcacccagaccaagtacacatttgtcgtgcctgaagacacccgtgtgggcacctctgtgggctctctgtttgttgaggacccagatgagccccagaaccggatgaccaagtacagcatcttgcggggcgactaccaggacgctttcaccattgagacaaaccccgcccacaacgagggcatcatcaagcccatgaagcctctggattatgaatacatccagcaatacagcttcatcgtcgaggccacagaccccaccatcgacctccgatacatgagccctcccgcgggaaacagagcccaggtcattatcaacatcacagatgtggacgagccccccattttccagcagcctttctaccacttccagctgaaggaaaaccagaagaagcctctgattggcacagtgctggccatggaccctgatgcggctaggcatagcattggatactccatccgcaggaccagtgacaagggccagttcttccgagtcacaaaaaagggggacatttacaatgagaaagaactggacagagaagtctacccctggtataacctgactgtggaggccaaagaactggattccactggaacccccacaggaaaagaatccattgtgcaagtccacattgaagttttggatgagaatgacaatgccccggagtttgccaagccctaccagcccaaagtgtgtgagaacgctgtccatggccagctggtcctgcagatctccgcaatagacaaggacataacaccacgaaacgtgaagttcaaattcactttgaatactgagaacaactttaccctcacggataatcacgataacacggccaacatcacagtcaagtatgggcagtttgaccgggagcataccaaggtccacttcctacccgtggtcatctcagacaatgggatgccaagtcgcacgggcaccagcacgctgaccgtggccgtgtgcaagtgcaacgagcagggcgagttcaccttctgcgaggatatggccgcccaggtgggcgtgagcatccaggcagtggtagccatcttactctgcatcctcaccatcacagtgatcaccctgctcatcttcctgcggcggcggctccggaagcaggcccgcgcgcacggcaagagcgtgccggagatccacgagcagctggtcacctacgacgaggagggcggcggcgagatggacaccaccagctacgatgtgtcggtgctcaactcggtgcgccgcggcggggccaagcccccgcggcccgcgctggacgcccggccttccctctatgcgcaggtgcagaagccaccgaggcacgcgcctggggcacacggagggcccggggagatggcagccatgatcgaggtgaagaaggacgaggcggaccacgacggcgacggccccccctacgacacgctgcacatctacggctacgagggctccgagtccatagccgagtccctcagctccctgggcaccgactcatccgactctgacgtggattacgacttccttaacgactggggacccaggtttaagatgctggctgagctgtacggctcggacccccgggaggagctgctgtattaggcggccgaggtcactctgggcctggggacccaaaccccctgcagcccaggccagtcagacgccaggcaccacagcctccaaaaatggcagtgactccccagcccagcaccccttcctcgtgggtcccagagacctcatcagccttgggatagcaaactccaggttcctgaaatatccaggaatatatgtcagtgatgactattctcaaatgctggcaaatccaggctggtgttctgtctgggctcagacatccacataaccctgtcacccacagaccgccgtctaactcaaagacttcctctggctccccaaggctgcaaagcaaaacagactgtgtttaactgctgcagggtctttttctagggtccctgaacgccctggtaaggctggtgaggtcctggtgcctatctgcctggaggcaaaggcctggacagcttgacttgtggggcaggattctctgcagcccattcccaagggagactgaccatcatgccctctctcgggagccctagccctgctccaactccatactccactccaagtgccccaccactccccaacccctctccaggcctgtcaagagggaggaaggggccccatggcagctcctgaccttgggtcctgaagtgacctcactggcctgccatgccagtaactgtgctgtactgagcactgaaccacattcagggaaatggcttattaaactttgaagcaactgtgaattcattctggaggggcagtggagatcaggagtgacagatcacagggtgagggccacctccacacccaccccctctggagaaggcctggaagagctgagaccttgctttgagactcctcagcacccctccagttttgcctgagaaggggcagatgttcccggagcagaagacgtctccccttctctgcctcacctggtcgccaatccatgctctctttcttttctctgtctactccttatcccttggtttagaggaacccaagatgtggcctttagcaaaactggacaatgtccaaacccactcatgactgcatgacggagccgagccatgtgtctttacacctcgctgttgtcacatctcagggaactgaccctcaggcacaccttgcagaaggcaaggccctgccctgcccaacctctgtggtcacccatgcatcttccactggaacgtttcactgcaaacacaccttggagaagtggcatcagtcaacagagaggggcagggaaggagacaccaagctcacccttcgtcatggaccgaggttcccactctgggcaaagcccctcacactgcaagggattgtagataacactgacttgtttgttttaaccaataactagcttcttataatgatttttttactaatgatacttacaagtttctagctctcacagacatatagaataagggtttttgcataataagcaggttgttatttaggttaacaatattaattcaggttttttagttggaaaaacaattcctgtaaccttctattttctataattgtagtaattgctctacagataatgtctatatattggccaaactggtgcatgacaagtactgtatttttttatacctaaataaagaaaaatctttagcctgggcaacaaaaaaa

SEQ ID NO: 23 - DNA, 4889 bp, Homo sapiens
  misc_feature: Incyte ID No: 1137924.1
acttgagtctcgaaccactgcatctccgactctctgcccagactcttcactccgcggcaccctcaaaccccagcccaggccggggcgcacaagccagccagcgcacctgcagtcctcgcccggacgcgccgcgccccctcggaaccaggctctgctccgagcagccttcgcccctcaagccagccacagtccccgccaggccgggtgggcgtcaagatgaaggcggcccgcttcgtgctgcgcagcgctggctcgctcaacggcgccggcctggtgccccgagaggtggagcatttctcgcgctacagcccgtccccgctgtccatgaagcagctactggactttggttcagaaaatgcatgtgaaagaacttcttttgcatttttgcgacaagaattgcctgtgagactcgccaacattctgaaggaaattgatatcctcccgacccaattagtaaatacctcttcagtgcaatgggttaaaagctggtatatacagagcctgatggatttggtggaattccatgagaaaagcccagatgaccagaaagcattatcagactttgtagatacactcatcaaagttcgaaatagacaccataatgtagtccctacaatggcacaaggaatcatagagtataaagatgcctgtacagttgacccagtcaccaatcaaaatcttcaatatttcttggatcgattttacatgaaccgtatttctactcggatgctgatgaaccagcacattcttatatttagtgactcacagacaggaaacccaagccacattggaagcattgatcctaactgtgatgtggtagcagtggtccaagatgcctttgagtgttcaaggatgctctgtgatcagtattatttatcatctccagaattaaagcttacacaagtgaatggaaaatttccagaccaaccaattcacatcgtgtatgttccttctcacctccatcatatgctctttgaactatttaagaatgcaatgcgggcaacagttgaacaccaggaaaatcagccttcccttacaccaatagaggttattgttgtcttgggaaaagaagaccttaccattaagatttcagacagaggaggtggtgttcccctgagaattattgaccgcctctttagttatacatactccactgcaccaacgcctgtgatggataattcccggaatgctcctttggctggttttggttacggcttgccaatttctcgtctgtatgccaagtactttcaaggagatctgaatctctactctttatcaggatatggaacagatgctatcatctacttaaaggctttgtcttctgagtctatagaaaaacttccagtttttaacaagtcagccttcaaacattatcagatgagctctgaggctgatgactggtgtatcccaagcagggaaccaaagaacctggcaaaagaagtggccatgtgaagagggacactcaggacactttacgggatcaaagtgggtctacaccagtgctgcttcctgaatgtttgtgtgtgaacccttgtttcctccaaaacaaacgacagcaacgaaaactccttaatcagaacactgatccaatgaggaatggagcttgtttctgtgacccaggagaacttagtgcaagactacaggagttaacagatggccagctccttattttttaatgtagaataactcctgagtttatatcaaatcctgaagaaataagcctcagttttccatctgtttttgataagaataagaaagggagtgagtgtgaagatggtggttagcagtttcactaagactgatattttaggcctcttgttcacatcaaaagatattggtgtcagaataccagcattttcctgccatgcaaaggattaaaacttagtttacactatgtggttacaaatatatgtcaatgtacattttgaacatatttatgtgctatggaaggaaatgctggtgactaaaataaggtttactctgaaagaggaggaattttattcaaagcattcaaacattttattcaagtgtttcaaaattcaaagcattgtattcaaagttgcagtgaaggcatcaacttatgtaaaaactcagaaggaaggctcctctgataaaaacacagctcctttattatgctgcttttcttgttcactttacacactaagtaaacacttattgtcaggtgcctagtcttgagtgaattgttagatgtgcactgaactcgggatgttggggattggagagagagaattgccaaagtaacagcaaaaatatctcttactttgctttgtttataaataaattagtagattggaaaaactagtgttagggaaagaaatcacatgttcagagcctaattcagtaggaagggcttttctctaccctgaaatgaaggtaatccaaaggcatccattttctaggcttaaaagatatatttttgatatatttaatgatattctctacactccagcattaatatgtctgtttaaaaattactaattctcaaatggctcaagaacattagaatttaagtaccttttagagtaattattttaagcaaatagcctggacgtaagagattctcatgccagcatgctttcatttgtcagttgttgtgactgagagataatgaatgacacctgaaatgcatatggtatttttgggagagttaaggtataatttgaaggttggcagaccagttgtgctgattactcttagagaagaagaaatggaaaaatgaaagaaggcaggaaggaaagaaaggatataggaagagagggaagcagaaggcaggcatttttctattttccccacaaattatttcaaaaaaaatctgtattttctgggatatgtcattggcaagaggaagaactggtgttttgaaagcagtatggattctttaaatgcctctcactcttacaagatagtaggctttgagataataaacttacccgtgtcaattaacatttaaactggcatatagaaaaaaaggaggatttttctgcattgtaaaataatcagtatggtttatatgttgaatttgacatttgtgtgtaatttcatggtggcctagtgttgtggtgcttctggtaatggtaatagaagctcaactatttttttgtggatttcagtttttatcatcagaagtcctagacagtgacatttcttaatggtgggagtccagctcatgcatttctgattatacaaaacagtttgcagtaggttatttgtcatttcagttttttactgaaatttgagctaaacatttttacatgtaaatacttgtatttaccaaagatttaaatcagttgattaattaattaactcaaatactgtgaactatctttaaaacactagaaaaaagaaatgttagtatctcaattacaccaactgtgcaaatgaactttgataaaatagaaataatctacattggcctttgtgaaatctggggaagagctttaggattctagtagatggatactgaatactcaggcccacttaaattattaatgtatacattgtgtttttgtctttatgctatgtacagagaaatgtgataattttttataataaatattttttatgatgataaaagacaatttcttgtaacttaaaaataaagtatatatctagaaaccaccacattaacatctactatttatagtacaatctccaattcaaagctaatctttgtatttctgtattttgcaacttttgagctagaatcttcctccctatccaactatactgttatgtaaccccattgttttaacatttaacaatacaacttgggtattctctgacaagcaagaatatatactattgatcacttctatacacaaaataaaaacagttcaaatgactagaaactaattttacaaaagaaaaaaaaacaggttagtaaaacatttcttttgaaaacaatgggtgaattagtattctgaattgagctagagcacatttttgcttgaagactctccatattaggcactatgcatttatatagtacagaacatttgcaaaatgcttttcaccatttattaggactcacaacacctgggcgctggggaatagccggactacctcagtttacacagggagaaccaaggcacactgtgagatcttgccagggccagagtgagacctcattagcttctgacttcttgtaggaagagccagatgtttctttgtggaggacattaatttgtttaatgataggagtaaaagtatgtgagatttgttgtgggaaaattagtttgggctccataaataaaaagttcagagcatggataaagtagagatttcactgtgaaaagggtcaatgaggagaagttaaaaccagatataaggctcttttcagacagatcacttttcagaaataaaaatagcaaaacgagaataggaaaaaaatagctatagagtttttcatttctaacccaaggggctttgataaaatcactttaaaagaaggatctctctcttaaaacaacccttaaacatcttattttttccccctcataagacccctgtgaggtagagagcacttacttacagggatgaagctaagaagtaaagttaagagtttaaaaccacatggatagtgaacaggctggagcagatgttatgtcttaaagcattggcttagaaatagaaacagaaggtagagaataaacaggaacttttatggatggacaagtggaataatccagggatctagtagcaacaccagctacttaacatttcttttaaaaaggacttggaatttcaagtatgtgatgaggcctaaaatgacaaacacttgtctgggtattgaaatgctcagctgaagggaatatatgcaatatgttctcataagaccatgtgggaaaaagcagaggcataaaagagct

SEQ ID NO: 24 - DNA, 1705 bp, Homo sapiens
  misc_feature: Incyte ID No: 247168.4
tccgctcctgatgcaaaccatgcctcagcagcttcacgctacgccccagtaaccccctgggcaccgctgcagtaacagatctgattctgcagctgatcaaggatgacactggtgagaaccctatgagggagtgaagcagcctggactcttaccacaagagggaggtgttataagagcaatgcagaggttggagtgggcagcagttggggcaggaggaagccgactgctgcctggtctgcaaagaagtcctttcaagtctctaggactggactcttcctaagcaagtccgagaaggaagcaccctcactatgtggctctacctggcggccttcgtgggcctgtactaccttctgcactggtaccgggagaggcaggtggtgagccacctccaagacaagtatgtctttatcacgggctgtgactcgggctttgggaacctgctggccagacagctggatgcacgaggcttgagagtgctggctgcgtgtctgacggagaagggggccgagcagctgaggggccagacgtctgacaggctggagacggtgaccctggatgttaccaagatggagagcatcgctgcagctactcagtgggtgaaggagcatgtgggggacagaggactctggggactggtgaacaatgcaggcattcttacaccaattaccttatgtgagtggctgaacactgaggactctatgaatatgctcaaagtgaacctcattggtgtgatccaggtgaccttgagcatgcttcctttggtgaggagagcacggggaagaattgtcaatgtctccagcattctgggaagagttgctttctttgtaggaggctactgtgtctccaagtatggagtggaagccttttcagatattctgaggcgtgagattcaacattttggggtgaaaatcagcatagttgaacctggctacttcagaacgggaatgacaaacatgacacagtccttagagcgaatgaagcaaagttggaaagaagcccccaagcatattaaggagacctatggacagcagtattttgatgccctttacaatatcatgaaggaagggctgttgaattgtagcacaaacctgaacctggtcactgactgcatggaacatgctctgacatcggtgcatccgcgaactcgatattcagctggctgggatgctaaatttttcttcatccctctatcttatttacctacatcactggcagactacattttgactagatcttggcccaaaccagcccaggcagtctaaagaaaactgggttggtgcttcttggaatgaaggcaaaaatctgaaattgttagtgtctcagtaatcctgatttagaacccaggctttttgtaacaatgtgttttcttgcctaaattcatttatctggcatcatcagagtactaacatgtttatatttcagatatccaaagcttaccactttaggtgatgaatctttactattttagcccttttttgatgagactatttgtctaaagtgaatcatttgttcttgccttattaaacagagtagatggaaaacaatttaacctattttgaagtcatttctttatgaatatgaataattgttctatgctttaataatctattgtgaggaaactactaagaaatatgttggtgtgtttgtccttacttgaaatgggtctgtattatggtacttttaataaatatttgatttttctttc

SEQ ID NO: 25 - DNA, 2309 bp, Homo sapiens
  misc_feature: Incyte ID No: 2275817CB1
ctctgctgtttggttgctcatggcaacaagatccaaataacttggacatgtgtttgtataaaaaaaacctgggaatggaacccaaagtgagactttggggctttcagttagtggaagagctgcggtccctccagctacaaggtgggcaccatggcggagaagtttgactgccactactgcagggatcccttgcaggggaagaagtatgtgcaaaaggatggccaccactgctgcctgaaatgctttgacaagttctgtgccaacacctgtgtggaatgccgcaagcccatcggtgcggactccaaggaggtgcactataagaaccgcttctggcatgacacctgcttccgctgtgccaagtgccttcaccccttggccaatgagacctttgtggccaaggacaacaagatcctgtgcaacaagtgcaccactcgggaggactcccccaagtgcaaggggtgcttcaaggccattgtggcaggagatcaaaacgtggagtacaaggggaccgtctggcacaaagactgcttcacctgtagtaactgcaagcaagtcatcgggactggaagcttcttccctaaaggggaggacttctactgcgtgacttgccatgagaccaagtttgccaagcattgcgtgaagtgcaacaaggccatcacatctggaggaatcacttaccaggatcagccctggcatgccgattgctttgtgtgtgttacctgctctaagaagctggctgggcagcgtttcaccgctgtggaggaccagtattactgcgtggattgctacaagaactttgtggccaagaagtgtgctggatgcaagaaccccatcactgggtttggtaaaggctccagtgtggtggcctatgaaggacaatcctggcacgactactgcttccactgcaaaaaatgctccgtgaatctggccaacaagcgctttgttttccaccaggagcaagtgtattgtcccgactgtgccaaaaagctgtaaactgacaggggctcctgtcctgtaaaatggcatttgaatctcgttctttgtgtccttactttctgccctataccatcaataggggaagagtggtccttcccttctttaaagttctccttccgtcttttctcccattttacagtattactcaaataagggcacacagtgatcatattagcatttagcaaaaagcaaccctgcagcaaagtgaatttctgtccggctgcaatttaaaaatgaaaacttaggtagattgactcttctgcatgtttctcatagagcagaaaagtgctaatcatttagccacttagtgatgtaagcaagaagcataggagataaaacccccactgagatgcctctcatgcctcagctgggacccaccgtgtagacacacgacatgcaagagttgcagcggctgctccaactcactgctcaccctcttctgtgagcaggaaaagaaccctactgacatgcatggtttaacttcctcatcagaactctgcccttccttctgttcttttgtgctttcaaataactaacacgaacttccagaaaattaacatttgaacttagctgtaattctaaactgacctttccccgtactaacgtttggtttccccgtgtggcatgttttctgagcgttcctactttaaagcatggaacatgcaggtgatttgggaagtgtagaaagacctgagaaaacgagcctgtttcagaggaacatcgtcacaacgaatacttctggaagcttaacaaaactaaccctgctgtcctttttattgtttttaattaatatttttgttttaattgatagcaaaatagtttatgggtttggaaacttgcatgaaaatattttagccccctcagatgttcctgcagtgctgaaattcatcctacagaagtaaccgcaaaactctagagggggagttgagcaggcgccagggctgtcatcaacatggatatgacatttcacaacagtgactagttgaatcccttgtaacgtagtagttgtctgctctttgtccatgtgttaatgaggactgcaaagtcccttctgttgtgattcctaggacttttcctcaagaggaaatctggatttccacctaccgcttacctgaaatgcaggatcacctacttactgtattctacattattatatgacatagtataatgagacaatatcaaaagtaaacatgtaatgacaatacatactaacattcttgtaggagtggttagagaagctgatgcctcatttctacattctgtcattagctattatcatctaacgtttcagtgtatccttacagaaatcaaga

SEQ ID NO: 26 - DNA, 2314 bp, Homo sapiens
  misc_feature: Incyte ID No: 2717806CB1
gtcgccacggtctcggggcaacaggcagatttgcctgctgagggtggagacccacgagccgaggcctcctgcagtgttccgcacagcaaaccgcacgctatggctgacagccgggatcccgccagcgaccagatgcagcactggaaggagcagcgggccgcgcagaaagctgatgtcctgaccaccggagctggtaacccagtaggagacaaacttaatgttattacagtagggccccgtgggccccttcttgttcaggatgtggttttcactgatgaaatggctcattttgaccgagagagaattcctgagagagttgtgcatgctaaaggagcaggggcctttggctactttgaggtcacacatgacattaccaaatactccaaggcaaaggtatttgagcatattggaaagaagactcccatcgcagttcggttctccactgttgctggagaatcgggttcagctgacacagttcgggaccctcgtgggtttgcagtgaaattttacacagaagatggtaactgggatctcgttggaaataacacccccattttcttcatcagggatcccatattgtttccatcttttatccacagccaaaagagaaatcctcagacacatctgaaggatccggacatggtctgggacttctggagcctacgtcctgagtctctgcatcaggtttctttcttgttcagtgatcgggggattccagatggacatcgccacatgaatggatatggatcacatactttcaagctggttaatgcaaatggggaggcagtttattgcaaattccattataagactgaccagggcatcaaaaacctttctgttgaagatgcggcgagactttcccaggaagatcctgactatggcatccgggatctttttaacgccattgccacaggaaagtacccctcctggactttttacatccaggtcatgacatttaatcaggcagaaacttttccatttaatccattcgatctcaccaaggtttggcctcacaaggactaccctctcatcccagttggtaaactggtcttaaaccggaatccagttaattactttgctgaggttgaacagatagccttcgacccaagcaacatgccacctggcattgaggccagtcctgacaaaatgcttcagggccgcctttttgcctatcctgacactcaccgccatcgcctgggacccaattatcttcatatacctgtgaactgtccctaccgtgctcgagtggccaactaccagcgtgacggcccgatgtgcatgcaggacaatcagggtggtgctccaaattactaccccaacagctttggtgctccggaacaacagccttctgccctggagcacagcatccaatattctggagaagtgcggagattcaacactgccaatgatgataacgttactcaggtgcgggcattctatgtgaacgtgctgaatgaggaacagaggaaacgtctgtgtgagaacattgccggccacctgaaggatgcacaaattttcatccagaagaaagcggtcaagaacttcactgaggtccaccctgactacgggagccacatccaggctcttctggacaagtacaatgctgagaagcctaagaatgcgattcacacctttgtgcagtccggatctcacttggcggcaagggagaaggcaaatctgtgaggccggggccctgcacctgtgcagcgaagccttagcgttcatccgtgtaacccgctcatcactggatgaagattctcctgtgctagatgtgcaaatgcaagctagtggcttcaaaatagagaatcccactttctatagcagattgtgtaacaattttaatgctatttccccaggggaaaatgaaggttaggatttaacagtcatttaaaaaaaaaatttgttttgacggatgattggattattcatttaaaatgattagaaggcaagtttctagctagaaatatgattttatttgacaaaatttgttgaaattatgtatgtttacatatcacctcatggcctattatattaaaatatggctataaatatataaaaagaaaagataaagatgatctactcagaaatttttatttttctaaggttctcataggaaaagtacatttaatacagcagtgtcatcagaagataacttgagcaccgtcatggcttaatgtttattcctgataataattgatcaaattcatttttttcactggagttacattaatgttaattcagcactgatttcacaacagatcaatttgtaattgcttacatttttacaataaataatctgtacgtaaaaaaaaaa

SEQ ID NO: 27 - DNA, 1049 bp, Homo sapiens
  misc_feature: Incyte ID No: 407624.1
ggaccctgatggtccgagggaccttccacagcaagtagaaggcactgctgtgaatatgatggcgtcagaggtgactgcaaaaaaggacagggcagctgggcgaggaagagataccagtgatgtcctaactgagctccctgggtctggtagtgaggagctcagtcttagaatatgagccgtgtcaggggctacagcatcatcactcttgtcctgtcgcagactcaggctccctgttctcaggttcttatgtagacagtgagggctcagggaggctcccaccaccgccaccaccagcaccaccactccatcaaaacggctgaaggaccttcctttagggttcgggggatctcctccttccacaagggatggatgtgaagacaactcattctttgatgttcagatggttgtggccctctgatgagatgtgtgcacaccttgccaaatgcatatgtctgttgagcctggacattaagtatttcttgatgttcttctgtgtaacaggtgatgtcctaggtgctgcagtgaacagaagagacaaaatatccttgttcccttgaagctaatgtcgtaggggcccaaaacaaagcaaacaaacaaaaaaaaggaatgcaagtcaagtacactttgtatggacagtggtaattcctaagaaggaaaacaaagatgggcttaaggggtgcagagggcctggactatgtgtgtctgcgggatagtctgttactacctctgggactctcatctcttgagtgtgcttgggtgtgtccaaccgtttttcctagtgacaaagtctgggtaattctgtggggacatatattggtgtatctgggaggtcccatgtgtctcagtggtggtccctgttttcaggaaagagtgtctgtgaatgtccatgtgtctcactgcacagctgtgatttttctgtgtctctgtgttttccagtctttgtgtgatgaaatataaaggcctagcaggctcagagttattaatgaattgtacttaagcgttgagaggcatatatttattgcactattaaattcttccaaaatatagtt

SEQ ID NO: 28 - DNA, 3635 bp, Homo sapiens
  misc_feature: Incyte ID No: 3950154CB1
taggtgatgaggtttatttgcatatttccagtcacataagcagccttggcgtgaaaacagtgtcagactcgattccccctcttcctcctcctcaagggaaagctgcccacttctagctgccctgccatcccctttaaagggcgacttgctcagcgccaaaccgcggctccagccctctccagcctccggctcagccggctcatcagtcggtccgcgccttgcagctcctccagagggacgcgccccgagatggagagcaaagccctgctcgtgctgactctggccgtgtggctccagagtctgaccgcctcccgcggaggggtggccgccgccgaccaaagaagagattttatcgacatcgaaagtaaatttgccctaaggacccctgaagacacagctgaggacacttgccacctcattcccggagtagcagagtccgtggctacctgtcatttcaatcacagcagcaaaaccttcatggtgatcaatggctggacggtaacaggaatgtatgagagttgggtgccaaaacttgtggccgccctgtacaagagagaaccagactccaatgtcattgtggtggactggctgtcacgggctcaggagcattacccagtgtccgcgggctacaccaaactggtgggacaggatgtggcccggtttatcaactggatggaggaggaatttaactaccctctggacaatgtccatctcttgggatacagccttggagcccatgctgctggcattgcaggaagtctgaccaataagaaagtcaacagaattactggcctcgatccagctggacctaactttgagtatgcagaagccccgagtcgtctttctcctgatgatgcagattttgtagacgtcttacacacattcaccagagggtcccctggtcgaagcattggaatccagaaaccagttgggcatgttgacatttacccgaatggaggtacttttcagccaggatgtaacattggagaagctatccgcgtgattgcagagagaggacttggagatgtggaccagctagtgaagtgctcccacgagcgctccattcatctcttcatcgactctctgttgaatgaagaaaatccaagtaaggcctacaggtgcagttccaaggaagcctttgagaaagggctctgcttgagttgtagaaagaaccgctgcaacaatctgggctatgagatcaataaagtcagagccaaaagaagcagcaaaatgtacctgaagactcgttctcagatgccctacaaagtcttccattaccaagtaaagattcatttttctgggactgagagtgaaacccataccaatcaggcctttgagatttctctgtatggcaccgtggccgagagtgagaacatcccattcactctgcctgaagtttccacaaataagacctactccttcctaatttacacagaggtagatattggagaactactcatgttgaagctcaaatggaagagtgattcatactttagctggtcagactggtggagcagtcccggcttcgccattcagaagatcagagtaaaagcaggagagactcagaaaaaggtgatcttctgttctagggagaaagtgtctcatttgcagaaaggaaaggcacctgcggtatttgtgaaatgccatgacaagtctctgaataagaagtcaggctgaaactgggcgaatctacagaacaaagaacggcatgtgaattctgtgaagaatgaagtggaggaagtaacttttacaaaacatacccagtgtttggggtgtttcaaaagtggattttcctgaatattaatcccagccctacccttgttagttattttaggagacagtctcaagcactaaaaagtggctaattcaatttatggggtatagtggccaaatagcacatcctccaacgttaaaagacagtggatcatgaaaagtgctgttttgtcctttgagaaagaaataattgtttgagcgcagagtaaaataaggctccttcatgtggcgtattgggccatagcctataattggttagaacctcctattttaattggaattctggatctttcggactgaggccttctcaaactttactctaagtctccaagaatacagaaaatgcttttccgcggcacgaatcagactcatctacacagcagtatgaatgatgttttagaatgattccctcttgctattggaatgtggtccagacgtcaaccaggaacatgtaacttggagagggacgaagaaagggtctgataaacacagaggttttaaacagtccctaccattggcctgcatcatgacaaagttacaaattcaaggagatataaaatctagatcaattaattcttaataggctttatcgtttattgcttaatccctctctcccccttcttttttgtctcaagattatattataataatgttctctgggtaggtgttgaaaatgagcctgtaatcctcagctgacacgtaatttgaatggtgcagaaaaaaaaaaagaaaccgtaattttattattagattctccaaatgattttcatcaatttaaaatcattcaatatctgacagttactcttcagttttaggcttaccttggtcatgcttcagttgtacttccagtgcgtctcttttgttcctggctttgacatgaaaagataggtttgagttcaaattttgcattgtgtgagcttctacagattttagacaaggaccgtttttactaagtaaaagggtggagaggttcctggggtggattcctaagcagtgcttgtaaaccatcgcgtgcaatgagccagatggagtaccatgagggttgttatttgttgtttttaacaactaatcaagagtgagtgaacaactatttataaactagatctcctatttttcagaatgctcttctacgtataaatatgaaatgataaagatgtcaaatatctcagaggctatagctgggaacccgactgtgaaagtatgtgatatctgaacacatactagaaagctctgcatgtgtgttgtccttcagcataattcggaagggaaaacagtcgatcaagggatgtattggaacatgtcggagtagaaattgttcctgatgtgccagaacttcgaccctttctctgagagagatgatcgtgcctataaatagtaggaccaatgttgtgattaacatcatcaggcttggaatgaattctctctaaaaataaaatgatgtatgatttgttgttggcatcccctttattaattcattaaatttctggatttgggttgtgacccagggtgcattaacttaaaagattcactaaagcagcacatagcactgggaactctggctccgaaaaactttgttatatatatcaaggatgttctggctttacattttatttattagctgtaaatacatgtgtggatgtgtaaatggagcttgtacatattggaaaggtcattgtggctatctgcatttataaatgtgtggtgctaactgtatgtgtctttatcagtgatggtctcacagagccaactcactcttatgaaatgggctttaacaaaacaagaaagaaacgtacttaactgtgtgaagaaatggaatcagcttttaataaaattgacaacattttattaccacaaaaaaaaaa

SEQ ID NO: 29 - DNA, 4036 bp, Homo sapiens
  misc_feature: Incyte ID No: 3741842CB1
gtcgcctctcacccgccccggccgctccagcccgaggcgccccgaccccgcgccactccgcgcccggccagccgcccgcagccatggggctcctgcccaagctcggcgtgtcccagggcagcgacacctctactagccgagccggccgctgtgcccgctcggtcttcggcaacattaaggtgtttgtgctctgccaaggcctcctgcagctctgccaactcctgtacagcgcctacttcaagagcagcctcaccaccattgagaagcgctttgggctctccagttcttcatcgggtctcatttccagcttgaatgagatcagcaatgccatcctcatcatctttgtcagctactttggcagccgggtgcaccgtccacgtctgattggcatcggaggtctcttcctggctgcaggtgccttcatcctcaccctcccacacttcctctccgagccctaccagtacaccttggccagcactgggaacaacagccgcttgcaggccgagctctgccagaagcattggcaggacctgcctcccagtaagtgccacagcaccacccagaacccccagaaggagaccagcagcatgtggggcctgatggtggttgcccagctgctggctggcatcgggacagtgcctattcagccatttgggatctcctatgtggatgacttctcagagcccagcaactcgcccctgtacatctccatcttatttgccatctctgtatttggaccggctttcgggtacctgctgggctctgtcatgctgcagatctttgtggactatggcagggtcaacacagctgcagttaacttggtcccgggtgacccccgatggattggagcctggtggctaggcctgctcatttcttcagctttattggttctcacctctttccccttttttttcttccctcgagcaatgcccataggagcaaagagggctcctgccacagcagatgaagcaaggaagttggaggaggccaagtcaagaggctccctggtggatttcattaaacggtttccatgcatctttctgaggctcctgatgaactcactcttcgtcctggtggtcctggcccagtgcaccttctcctccgtcattgctggcctctccaccttcctcaacaagttcctggagaagcagtatggcacctcagcagcctatgccaacttcctcattggtgctgtgaacctccctgctgcagccttggggatgctgtttggaggaatcctcatgaagcgctttgttttctctctacaagccattccccgcatagctaccaccatcatcaccatctccatgatcctttgtgttcctttgttcttcatgggatgctccaccccaactgtggccgaagtctacccccctagcacatcaagttctatacatccgcagtctcctgcctgccgcagggactgctcgtgcccagattctatcttccacccggtctgtggagacaatggaatcgagtacctctccccttgccatgccggctgcagcaacatcaacatgagctctgcaacctccaagcaactgatctatttgaactgcagctgtgtgaccgggggatccgcttcagcaaagacaggatcgtgccctgtcccctgtgcccacttcctgctcccggccatcttcctcatctccttcgtgtccctgatagcctgcatctcccacaaccccctctacatgatggttctgcgtgtggtgaaccaggaggaaaagtcatttgccatcggggtgcagttcttgttgatgcgcttgctggcctggctgccatctccagccctctatggcctcaccattgaccactcctgcatccggtggaactcgctgtgcttggggaggcgaggggcctgcgcctactatgacaacgatgctctccgagacaggtacctgggcctgcagatgggctacaaggcgctgggcatgctgctgctttgcttcatcagctggagggtgaagaagaacaaggagtacaacgtgcagaaggcggcaggcctcatctgaccccaccctgggccactgccctgctccagagagtggaccttgactcttccacacctgcctatactcactaatgttaacacgtcatttcctttttgtatttttaaacaagaaagaaaaccccagtcctcatttgccttccctacctcttcctcccagagtcctccccacagttcctaagggccactgtgtacccgggctgtgtgggccagaactggggggctgagtcttccctggccccttggaagaggcccccagatgcccaggctcacttcagtgttgagtcctccattgaggatgcccactgaggcagccaggcccctcaccagccctggggggaatcctaaacagagagagaaaaagggtatctgcccttcttgccaggcagctccactctcccgctgactgcccacaccctgcagagtggcaggggtgaaaggaagaaggaagtggctgagttattaatagccagagccactgggagactggggagactggctgtaacccccttcacacctgggtttggcatcagcacagactacgggaggggctggctccctccccctcagaccctcacttcctgtacctagaggccattctggatgctgccatgttgggaagtacagtctctgcccattacctgcatgcaggcaccagagcagggactgagaaaccccaaggatgggtcatctaagtgctgtccatatgaaccctggactttctgtccttagatcctcacatgttatccctgtctttctggggtacgtttcaaactgaggaagctacaacacagtgaagacccaaggaaggcctatgaaatggtcctgatgcccaacctcccaccccttcaatgtggggacgagaccccctcatctcagagtaatgggaagaacctcccacatctccctggcagcagatgaggtggcttcacatgcacttccctgtctggacttcagcccgtattccgaggagtagagaggcagaagagatgtcagcaaagcaagtgatgaagcagagtggatgtccactgtcaccaagctggatggcaagctgcggcccacaaaacagccagtcaggttggctttcctggtttcagacatgctcataccattcccattttctcagcctcttctcactgcctccagagaggtgggtgcctgggttgagagacacagctgctacgtgatagatgttgagagacagaagccaacgaaggaggtcattcatcaacaaatatatttattggagaccgactttgtgcaaagcaatgctaatcagggttctccatggagcttccctcagctcttacctcacctccctccatttacattagggccttctcccagggtgtgctcggtgggcagtgtgggactgggggtgtgggagttggtgagagcaggaggagaggtggggacagcaagaagccacagattggcatgaaggatcctgacctgactatccatgccatccatggcccccagactgactctgcacctggccctttgccagacagctctgtctccccatgtcctctggaacagctgggcatgggtcatggccattcatgacccttaagtgccacccttcttggaagaccccctccagaagcatactggaagccacctctggaaaagcctcatatggtgatatgccaaaatatttatgtcaatgtccaaacaaagtccaatgccatgagactgaagtctttgtggaaaccactgttacagacaagcttatttccaaagccacctcatttccaaacatctcactcaggaagggaggctcaatgtaacctcaggggccagttttagcatttgaaatggttctgcttggaaaatgatgccctgcaactaaccctggtctttcccatggcaatttaaccacatttggaaggcactgccttcagctgagtttatgaacaatgaatgccaaccttcaggttctagaagattggttgcactcccaaacctttattctattatattactattaaaatattctaattttgctattgaaaaaaaaaa

SEQ ID NO: 30 - DNA, 2712 bp, Homo sapiens
  misc_feature: Incyte ID No: 221055.4
gtgctgactgaggcgctgcagccaggagccgcggccggctgcccagcgctcgccgcctccgcgcgtccgcagccgtccccgcgccgacatgcgcttggccgccgccgcgaacgaggcgtacacggcccctttggcggtctcggggctgctgggctgcaagcagtgcggcgggggccgcgaccaggacgaggaacttggcattagaattcctcgaccaataggacagggaccaagcagattcatcccagaaaaggagatcctccaagtggggagtgaagacgcacagatgcatgctttatttgcagattcttttgctgctttgggccgtttggataacattacgttagtgatggttttccacccacaatatttagaaagtttcttaaaaactcagcactatctactgcaaatggatgggccgttacccctacattatcgtcactacattggaataatggctgcggcaagacatcagtgctcctacttagtgaacctgcatgtaaatgatttccttcatgttggtggggaccccaagtggctcaatggtttagagaatgctcctcaaaaactacagaatttaggagaacttaacaaagtgttagcccatagaccttggcttattaccaaagaacacattgagggacttttaaaagctgaagagcacagctggtcccttgcggaattggtacatgcagtagttttactcacacactatcattctcttgcctcattcacattcggctgtggaatcagtccagaaattcattgtgatggtggccacacattcagacctccttctgttagcaactactgcatctgtgacattacaaatggcaatcacagtgtggatgagatgccggtcaactcagcagaaaatgtttctgtaagtgattctttctttgaggttgaagccctcatggaaaagatgaggcagttacaggaatgtcgagatgaagaagaggcaagtcaggaagagatggcttcacgttttgaaatagaaaaaagagagagtatgtttgtcttctcttcagatgatgaagaagttacaccagcaagagctgtatctcgtcattttgaggatactagttatggctataaagatttctctagacatgggatgcatgttccaacatttcgtgtccaggactattgctgggaagatcatggttattctttggtaaatcgcctttatccagatgtgggacagttgattgatgaaaaatttcacattgcttacaatcttacttataatacaatggcaatgcacaaagatgttgatacctcaatgcttagacgggcaatttggaactatattcactgcatgtttggaataagatatgatgattatgactatggtgaaattaaccagctattggatcgtagctttaaagtttatatcaaaactgttgtttgcactcctgaaaaggttaccaaaagaatgtatgatagcttctggaggcagttcaagcactctgagaaggttcatgttaatctgcttcttatagaagctaggatgcaagcagaactcctttatgctctgagagccattacccgctatatgacctgatgcctttccttcattaaagatgattctggaatgatcagcagatatagtctacaagggggaaggtactaagccccaggaccaatggtagacaaaataattcagaaatccattgtgccatgattcctttagtttctgctatttttctgtggaaaaccactgctggcacaagcagtgactgtttggcagcttcaagtttagagctgtgaagacaggctgccattcacagtattttgctttttgacagtacaagatgctgtgtaactgttttaatacagcaaatagtaactctccaaatcctgttgcttttatgttaaataagataacaagaattggagcatgcaaagaatgggacttggataatgacttaagctttatatgtaaagaattttagaagatcttggtgctgctattcctgctggaggaatgaatagatggctgtttcagttaagctattagtaataaaagtgaacattgctactatctgagcctacatacataacttgtgtgatttcaaattaaacttgcattatgtgttaattttcttgcatctaaaaaagcatagaattcctactcacacagctcagcaacaaccattttgatggtaacagttaatttctttcattagttttttaaattcagggttctggatattaaattaaaatggcattcttaaagattttcttcaaaaagcaatcctaaatgaaagtgtgtaaattataagaagctggcgatcttttgatatgctgtttcacaggatcctgacactggagggcagctgtcttgtgcattacttgtgtttccagcaccaaagttgtgggacatgttgctgtagactgctgcgcagtcctgggtgcattcagtctctctgcctctgcctgcctcctggtccccactttaaaggctgtgcagctccttaaataataaagctggaaaatatttttagtcgggttatcaaatttgatttacaaaaacgctaactttgtttgaaatgcaaacaggtttgaaaatatgtattaagtactttgtattctggaagcgtgaattgcttttgaagtctgtcagtattactggtatttttaaataaagaagaatttttctccaatttaaaaatatgtattaagtactttgtattctggaagcgtgaa

SEQ ID NO: 31 - DNA, 1913 bp, Homo sapiens
  misc_feature: Incyte ID No: 379425CB1
gcggcttttggttcggcgcagagagacccgggggtctagcttttcctcgaaaagcgccgccctgcccttggccccgagaacagacaaagagcaccgcagggccgatcacgctgggggcgctgaggccggccatggtcatggaagtgggcaccctggacgctggaggcctgcgggcgctgctgggggagcgagcggcgcaatgcctgctgctggactgccgctccttcttcgctttcaacgccggccacatcgccggctctgtcaacgtgcgcttcagcaccatcgtgcggcgccgggccaagggcgccatgggcctggagcacatcgtgcccaacgccgagctccgcggccgcctgctggccggcgcctaccacgccgtggtgttgctggacgagcgcagcgccgccctggacggcgccaagcgcgacggcaccctggccctggcggccggcgcgctctgccgcgaggcgcgcgccgcgcaagtcttcttcctcaaaggaggatacgaagcgttttcggcttcctgcccggagctgtgcagcaaacagtcgacccccatggggctcagccttcccctgagtactagcgtccctgacagcgcggaatctgggtgcagttcctgcagtaccccactctacgatcagggtggcccggtggaaatcctgccctttctgtacctgggcagtgcgtatcacgcttcccgcaaggacatgctggatgccttgggcataactgccttgatcaacgtctcagccaattgtcccaaccattttgagggtcactaccagtacaagagcatccctgtggaggacaaccacaaggcagacatcagctcctggttcaacgaggccattgacttcatagactccatcaagaatgctggaggaagggtgtttgtccactgccaggcaggcatttcccggtcagccaccatctgccttgcttaccttatgaggactaatcgagtcaagctggacgaggcctttgagtttgtgaagcagaggcgaagcatcatctctcccaacttcagcttcatgggccagctgctgcagtttgagtcccaggtgctggctccgcactgttcggcagaggctgggagccccgccatggctgtgctcgaccgaggcacctccaccaccaccgtgttcaacttccccgtctccatccctgtccactccacgaacagtgcgctgagctaccttcagagccccattacgacctctcccagctgctgaaaggccacgggaggtgaggctcttcacatcccattgggactccatgctccttgagaggagaaatgcaataactctgggaggggctcgagagggctggtccttatttatttaacttcacccgagttcctctgggtttctaagcagttatggtgatgacttagcgtcaagacatttgctgaactcagcacattcgggaccaatatatagtgggtacatcaagtccatctgacaaaatggggcagaagagaaaggactcagtgtgtgatccggtttctttttgctcgcccctgttttttgtagaatctcttcatgcttgacatacctaccagtattattcccgacgacacatatacatatgagaatataccttatttatttttgtgtaggtgtctgccttcacaaatgtcattgtctactcctagaagaaccaaatacctcaatttttgtttttgagtactgtactatcctgtaaatatatcttaagcaggtttgttttcagcactgatggaaaataccagtgttgggtttttttttagttgccaacagttgtatgtttgctgattatttatgacctgaaataatatatttcttcttctaagaagacattttgttacataaggatgacttttttatacaatggaataaattatggcatttctattgaaaaaaaaaaaaaaa

SEQ ID NO: 32 - DNA, 1415 bp, Homo sapiens
  misc_feature: Incyte ID No: 1685090CB1
tctaaacgggaacagccctggctgagggagctgcagcgcagcagagtatctgacggcgccaggttgcgtaggtgcggcacgaggagttttcccggcagcgaggaggtcctgagcagcatggcccggaggagcgccttccctgccgccgcgctctggctctggagcatcctcctgtgcctgctggcactgcgggcggaggccgggccgccgcaggaggagagcctgtacctatggatcgatgctcaccaggcaagagtactcataggatttgaagaagatatcctgattgtttcagaggggaaaatggcaccttttacacatgatttcagaaaagcgcaacagagaatgccagctattcctgtcaatatccattccatgaattttacctggcaagctgcagggcaggcagaatacttctatgaattcctgtccttgcgctccctggataaaggcatcatggcagatccaaccgtcaatgtccctctgctgggaacagtgcctcacaaggcatcagttgttcaagttggtttcccatgtcttggaaaacaggatggggtggcagcatttgaagtggatgtgattgttatgaattctgaaggcaacaccattctccaaacacctcaaaatgctatcttctttaaaacatgtcaacaagctgagtgcccaggcgggtgccgaaatggaggcttttgtaatgaaagacgcatctgcgagtgtcctgatgggttccacggacctcactgtgagaaagccctttgtaccccacgatgtatgaatggtggactttgtgtgactcctggtttctgcatctgcccacctggattctatggagtgaactgtgacaaagcaaactgctcaaccacctgctttaatggagggacctgtttctaccctggaaaatgtatttgccctccaggactagagggagagcagtgtgaaatcagcaaatgcccacaaccctgtcgaaatggaggtaaatgcattggtaaaagcaaatgtaagtgttccaaaggttaccagggagacctctgttcaaagcctgtctgcgagcctggctgtggtgcacatggaacctgccatgaacccaacaaatgccaatgtcaagaaggttggcatggaagacactgcaataaaaggtacgaagccagcctcatacatgccctgaggccagcaggcgcccagctcaggcagcacacgccttcacttaaaaaggccgaggagcggcgggatccacctgaatccaattacatctggtgaactccgacatctgaaacgttttaagttacaccaagttcatagcctttgttaacctttcatgtgttgaatgttcaaataatgttcattacacttaagaatactggcctgaattttattagcttcattataaatcactgagctgatatttactcttcctg

SEQ ID NO: 33 - DNA, 4340 bp, Homo sapiens
  misc_feature: Incyte ID No: 350476.1
  unsure 4249: a, t, c, g, or other
ccctctggaacctggcagcagctccccagcttccatcccaaccctgaaccaaggggatttgttaatgggatttaagccacaggctctttagcacccaggactggatggacctccattaatcccagaagcccctgggctgcaaaaggagagacgcaacccagtgatgtggagacagagaggcaatgtcccaggtcttcagagtcaatcccgacgtgtcaatcccgacgatagagagctcggaggtgatccacaaatccaagcacccagagatcaattgggatccttggcagatggacatcagtgtcatttactaaccagcaggatggagacgacgcccttgaattctcaggacagcagctatcagcgtgtgaagatggcgaagatcgtcaggaaaacggagttctacagaaggttgttcccaccccaggggacaaagtggagtccggggcaaatatccaatggggtactcagcagttccaagtccttggtgcgggagatgacacacggcactctatcccagcgaccaccaccaccctagtggctgagcttcatcaaggggaacgggagacctggggcaagaaggtggatttccttctctcagtgattggctatgctgtggacctgggcaatgtctggcgcttcccctacatatgttaccagaatggagggggggcattcctcctcccctacaccatcatggccatttttgggggaatcccgctcttttacatggagctcgcactgggacagtaccaccgaatatggatgcatctcaatatgtgaggaaaatctgcccgattttcaccgggattggttatgccatctgcatcattgccttttacattgcttcctactacaacaccatcatggcctgtgcgctatactacctcatctcctccttcacggaccagctgccctggaccagctgcaagaactcctggaacactggcaactgcaccaattacttctccgaggacaacatcacctggaccctccattccacgtcccctgctgaagaattttacacgcgccacgtcctgcagatccaccggtctaaggggctccaggacctggggggcatcagctggcagctggccctctgcatcatgctgatcttcactgttatctacttcagcatctggaaaggcgtcaagacctctggcaaggtggtgtgggtgacagccaccttcccttatatcatcctttctgtcctgctggtgaggggtgccaccctccctggagcctggaggggtgttctcttctacttgaaacccaattggcagaaactcctggagacaggggtgtggatagatgcagccgctcagatcttcttctctcttggtccgggctttggggtcctgctggcttttgctagctacaacaagttcaacaacaactgctaccaagatgccctggtgaccagcgtggtgaactgcatgacgagcttcgtttcgggatttgtcatcttcacagtgctcggttacatggctgagatgaggaatgaagatgtgtctgaggtggccaaagacgcaggtcccagcctcctcttcatcacgtatgcagaagcgatagccaacatgccagcgtccactttctttgccatcatcttctttctgatgttaatcacgctgggcttggacagcacgtttgcaggcttggagggggtgatcacggctgtgctggatgagttcccacacgtctgggccaagcgccgggagcggttcgtgctcgccgtggtcatcacctgcttctttggatccctggtcaccctgacttttggaggggcctacgtggtgaagctgctggaggagtatgccacggggcccgcagtgctcactgtcgcgctgatcgaagcagtcgctgtgtcttggttctatggcatcactcagttctgcagggacgtgaaggaaatgctcggcttcagcccggggtggttctggaggatctgctgggtggccatcagccctctgtttctcctgttcatcatttgcagttttctgatgagcccgccacaactacgacttttccaatataattatccttactggagtatcatcttgggttactgcataggaacctcatctttcatttgcagttcccactatatatagcttatcggttgatcatcacatccagggacattctcaagagcgtattattaaaagtattaccccagaacaccaactagaaattccttgtggggacatccgcttgaatgctgtgtaacacactcaccgagaggcaaaaaggcttctccacaatctcctccgtccagttctgatgaggcaggcctgtattctcccctccaagtgaatgagtttccagctaagcctgatgatggaagggccttctccacagggacacagtctggtgcccagactcaaggcctccaggcacttattctccatggattcccctggacatattcccatggtagactgtgacacagctgagctggcctattttggacgtgtgaggatgtggatggaggtgatgaaaaccaccctatcatcagttaggattaggtttagaatcaagtctgtgaaagtctcctgtatcatttcttggtatgatcattggtatctgatatctgtttgcttctaaaggtttcactgttcatgaatacgtaaaactgcgtaggagagaacagggatgctatctcgctagccatatattttctgagtagcatatagaattttattgctggaatctactagaaccttctaatccatgtgctgctgtggcatcaggaaaggaagatgtaagaagctaaaatgaaaaatagtgtgtccatgcaagcttgtgagtctgtgtatattgttgtttcagtgtattcttatctctagtccaatattttgggcccattacaaatatatgaattccccaaatttttcttacagtaacaaattctaccaactcaattgtgtatggaggttattatttgaagggtacaatcactacaacatgctctgccacccactccttttccagtgacactacttgagccacacactttcctttacaggccagcctctggcgtttgctgcacctcattgccaccttcctgtctctctgtgctaaacattcaggacagtgttccacaggcagatctggcctatttcattagtcaccatggcttggctgtgaagtacgttgaaggtggatcttgtcacatgccccttcagtgttcacctggccctctggtttaagttctgtctgccttacgtgactgagtttgactgtccaggttgctttgctcggtgaagagaggagggtaaatcggattctcgtttagcactgggttatacagatctggcaccctaacctaaaccaaggcatcttcactccaagagcagttggagagtctgggttagccttacgtggacctcgccgctcgctggcggtcacgattgtgagccctccagataatttttaaggttgagtctaagtaaggctgcttgggaaatggtcagttaagtaaatcacctttcatttcacataaggcccttaatatagataagtaaatttggcctttggtgtctcgtgactctcagagggcgtaggtagaggagcaaattaatatttgcagcatgggaattccttatcagaattttgaggggaataaatcctcatcagagacaaaaggacttaatcatctgggccacctatcacttccagttctctgtataaatgaaatttaattctaacaaccttataaaaagaaggtccagacagccagaggaaacatcctgtccaattctaggttttcctcccttggcctcctttccccagcattgtctaccctggcccacttcctgcattctccccatgccctgctatttctgattctttgcttctcctagcgagatactttccttatatgatagctgctgagaagtttcccagaactgctagaggaaaagaagtggggaatttaggaaatatccctcactgacctaactccattatcttcactctttccttctgtcctgccacctcatgcccattctctttactgtctagcatgctgaaagaaggaagggatctaaatgccagcgtgttcagtggtaaatattagttggtgcaaaagaaaaaccatgattacttttgcactaacctaatagctttgcaacattttcaacgaacttgctttatgaagatattcggatatggattcatccccaccccacatacttagacattgttcaaatatactacttttaaaaaaacaccctttttccaaagcagnacattacgcgtttagccaagtctggtattaatggaattgtacaggagctttgaaagttttcaaactttattaaactaaaaaaaaaaaatcg

SEQ ID NO: 34 - DNA, 2162 bp, Homo sapiens
  misc_feature: Incyte ID No: 404278.1
  unsure 1724, 1821: a, t, c, g, or other
acacacacctacacttttgtatatattcaagggatccattgtagctgaaaccaatccaatatctcttccaatattttaccaatcccttctagagattatctagttctaccatctcattttacagatgaggaaattgaggcccaattaagactagaatctagattctcttactcccagtttaatgtccactcaggacttcatcttaagcacttcttcactatagaaagcatgggacaactcacccagagtatacttctttgtctctattcactggctggcttcaaaacaacacaaaagcatctaacttggaggacaatgtcatctggagcatctccagccacttccttcccccactctgatatggtgtgacagaggtacaactggctgggagcctgccttctggccctctccctatgaccaagtagagtgaccactgccagactttagctgatctctatatgtagtcgaccaaatgacctgggaagcatcaaggcaccctcacaactgtgtttccccagagagttttagccagaaaaatacagagtctttggggatttgggcctttgttgttttgaaagtgggaagtaggagaaagaacagggagagaagtaggtagggtgtgaagagaagtataattttatctcatttctttctctgagagatctaagaagtcaagagacacaagagatccagtgtaacttgattttattaatgtttgcattctgtccttcatgtaaccttacgctggagtattggacctggatcaccatcctctctgtcagaattgcgtctcactgatgaacattttcatttcccaggagtggttgatcatgcatcttggcaaatttccctcatttctctttacagtccccattcctgacctttgagaaacagtcatcaaagtgtagaagtaaagtcttttaaaatgcctttccagatggacccttagaactctttcaaagatatttgtaaatattcactctaaatgtaatagaaataaaaagctgtagatcttcattacagaaaaaccattagctcaagattgaagagctcacagtcttaggcacagtttcatcttacgctgtcattatttagatcccaagaaagagagggtgggattggctatcccacagtatagcggggaggagggcagtgcaggaaaggacattgattcctagtaaaagatccattaaaaaacagaaataagaatgaagtaccagaacgtaatttatcatccctttatgctacagaagaaaacttgcaagacagtgtaaggtttccctggaacttgttagaaatgtcatctagacgttgagccaggaacacaatcaagcaacctttcagggtatagccaggccccaagcctcttcagaactgggaataatgttttgaattgaaacagaggtgtaaagcagagaggtcagagcagatcaatactggttatgggtgatgagatccagacagaacagtccccaaaaaaataactgtcttacaacgagggggtgtgatggatgtgttattttgtttttttttgagtctagtagtattactgtctgaaactggtcagtttttaggggcaacttcaaaatgttatttgtgtctttcttgtaaatacctgccaagattaatacccaatcaaatgccatgacttggaaataaacaaatattcatttcttatctataattaccttttggtgtaatcctttcaacttgtgtaaataggntataacagaataacaccaatagttgttttaagatagactgaaaaacccaaaatgcccatatttaattataactctgacagtagtgtgtttctgaganaaattgtttataataaacagaaccaagtatatgaatacatcataggcatagaagtctgactgactgttcattctcatcttttcctataaaatgaactcagacctatttaaataggattaatatattagttcctttcaccatgcaggcctgataatttccacattgccagaccaacaaacagtttttggaagaagcatgccaccctcaagaaccactggtaaatgtctcacaggcatctgaatttgtctgacctggtttgcgctctgtgggtccatatggctgaagtaacaagattgtggctcaactaatgtcacagttataacaatagacatagattgcta

SEQ ID NO: 35 - DNA, 2143 bp, Homo sapiens
  misc_feature: Incyte ID No: 1250492CB1
tgcagcaagtgctgcgaggacttggaggaggcgcaggaggggcaggatgtccctgtcaaggctcctgagacctttgataacataaccattagcagagaggctcagggtgaggtccctgcctcggactcaaagaccgaatgcacggccttgtaggggacgccccagattgtcagggatggggggatggtccttgagttttgcatgctctcctccctcccacttctgcaccctttcaccacctcgaggagatttgctccccattagcgaatgaaattgatgcagtcctacctaactcgattccctttggcttggtgggtaggcctgcagggcacttttattccaacccctggtcactcagtaatcttttactccaggaaggcacaggatggtacctaaagagaattagagaatgaacctggcgggacggatgtctaatcctgcacctagctgggttggtcagtagaacctattttcagactcaaaaaccatcttcagaaagaaaaggcccagggaaggaatgtatgagaggctctcccagatgaggaagtgtactctctatgactatcaagctcaggcctctccctttttttaaaccaaagtctggcaaccaagagcagcagctccatggcctccttgccccagatcagcctgggtcaggggacatagtgtcattgtttggaaactgcagaccacaaggtgtgggtctatcccacttcctagtgctccccacattccccatcagggcttcctcacgtggacaggtgtgctagtccaggcagttcacttgcagtttccttgtcctcatgcttcggggatgggagccacgcctgaactagagttcaggctggatacatgtgctcacctgctgctcttgtcttcctaagagacagagagtggggcagatggaggagaagaaagtgaggaatgagtagcatagcattctgccaaaagggccccagattcttaatttagcaaactaagaagcccaattcaaaagcattgtggctaaagtctaacgctcctctcttggtcagataacaaaagccctccctgttggatcttttgaaataaaacgtgcaagttatccaggctcgtagcctgcatgctgccaccttgaatcccagggagtatctgcacctggaatagctctccacccctctctgcctccttactttctgtgcaagatgacttcctgggttaacttccttctttccatccacccacccactggaatctctttccaaacatttttccattttcccacagatgggctttgattagctgtcctctctccatgcctgcaaagctccagatttttggggaaagctgtacccaactggactgcccagtgaactgggatcattgagtacagtcgagcacacgtgtgtgcatgggtcaaaggggtgtgttccttctcatcctagatgccttctctgtgccttccacagcctcctgcctgattacaccactgcccccgccccaccctcagccatcccaattcttcctggccagtgcgctccagccttatctaggaaaggaggagtgggtgtagccgtgcagcaagattggggcctcccccatcccagcttctccaccatcccagcaagtcaggatatcagacagtcctcccctgaccctcccccttgtagatatcaattcccaaacagagccaaatactctatatctatagtcacagccctgtacagcatttttcataagttatatagtaaatggtctgcatgatttgtgcttctagtgctctcatttggaaatgaggcaggcttcttctatgaaatgtaaagaaagaaaccactttgtatattttgtaataccacctctgtggccatgcctgccccgcccactctgtatatatgtaagttaaacccgggcaggggctgtggccgtctttgtactctggtgatttttaaaaattgaatctttgtacttgcattgattgtataataattttgagaccaggtctcgctgtgttgctcaggctggtctcaaactcctgagatcaagcaatccgcccacctcagcctcccaaagtgctgagatcacaggcgtgagccaccaccaggcctgattgtaatttttttttttttttttttactggttatgggaagggagaaataaaatcata

SEQ ID NO: 36 - DNA, 3952 bp, Homo sapiens
  misc_feature: Incyte ID No: 200095.2
ctcacagcccagcacctgcggagggagcgctgaccatggctccctggcctgaattgggagatgcccagcccaaccccgataagtacctcgaaggggccgcaggtcagcagcccactgcccctgataaaagcaaagagaccaacaaaacagataacactgaggcacctgtaaccaagattgaacttctgccgtcctactccacggctacactgatagatgagcccactgaggtggatgacccctggaacctacccactcttcaggactcggggatcaagtggtcagagagagacaccaaagggaagattctctgtttcttccaagggattgggagattgattttacttctcggatttctctactttttcgtgtgctccctggatattcttagtagcgccttccagctggttggaggaaaaatggcaggacagttcttcagcaacagctctattatgtccaaccctttgttggggctggtgatcggggtgctggtgaccgtcttggtgcagagctccagcacctcaacgtccatcgttgtcagcatggtgtcctcttcattgctcactgttcgggctgccatccccattatcatgggggccaacattggaacgtcaatcaccaacactattgttgcgctcatgcaggtgggagatcggagtgagttcagaagagcttttgcaggagccactgtccatgacttcttcaactggctgtccgtgttggtgctcttgcccgtggaggtggccacccattacctcgagatcataacccagcttatagtggagagcttccacttcaagaatggagaagatgccccagatcttctgaaagtcatcactaagcccttcacaaagctcattgtccagctggataaaaaagttatcagccaaattgcaatgaacgatgaaaaagcgaaaaacaagagtcttgtcaagatttggtgcaaaacttttaccaacaagacccagattaacgtcactgttccctcgactgctaactgcacctccccttccctctgttggacggatggcatccaaaactggaccatgaagaatgtgacctacaaggagaacatcgccaaatgccagcatatctttgtgaatttccacctcccggatcttgctgtgggcaccatcttgctcatactctccctgctggtcctctgtggttgcctgatcatgattgtcaagatcctgggctctgtgctcaaggggcaggtcgccactgtcatcaagaagaccatcaacactgatttcccctttccctttgcatggttgactggctacctggccatcctcgtcggggcaggcatgaccttcatcgtacagagcagctctgtgttcacgtcggccttgacccccctgattggaatcggcgtgataaccattgagagggcttatccactcacgctgggctccaacatcggcaccaccaccaccgccatcctggccgccttagccagccctggcaatgcattgaggagttcactccagatcgccctgtgccactttttcttcaacatctccggcatcttgctgtggtacccgatcccgttcactcgcctgcccatccgcatggccaaggggctgggcaacatctctgccaagtatcgctggttcgccgtcttctacctgatcatcttcttcttcctgatcccgctgacggtgtttggcctctcgctggccggctggcgggtgctggttggtgtcggggttcccgtcgtcttcatcatcatcctggtactgtgcctccgactcctgcagtctcgctgcccacgcgtcctgccgaagaaactccagaactggaacttcctgccgctgtggatgcgctcgctgaagccctgggatgccgtcgtctccaagttcaccggctgcttccagatgcgctgctggctgctgctgccgcgtgtgctgccgcgcgtgctgcttgctgtgtggctgccccaagtgctgccgctgcagcaagtgctgcgaggacttggaggaggcgcaggaggggcaggatgtccctgtcaaggctcctgagacctttgataacataaccattagcagagaggctcagggtgaggtccctgcctcggactcaaagaccgaatgcacggccttgtaggggacgccccagattgtcagggatggggggatggtccttgagttttgcatgctctcctccctcccacttctgcaccctttcaccacctcgaggagatttgctccccattagcgaatgaaattgatgcagtcctacctaactcgattccctttggcttggtgggtaggcctgcagggcacttttattccaacccctggtcactcagtaatcttttactccaggaaggcacaggatggtacctaaagagaattagagaatgaacctggcgggacggatgtctaatcctgcacctagctgggttggtcagtagaacctattttcagactcaaaaaccatcttcagaaagaaaaggcccagggaaggaatgtatgagaggctctcccagatgaggaagtgtactctctatgactatcaagctcaggcctctccctttttttaaaccaaagtctggcaaccaagagcagcagctccatggcctccttgccccagatcagcctgggtcaggggacatagtgtcattgtttggaaactgcagaccacaaggtgtgggtctatcccacttcctagtgctccccacattccccatcagggcttcctcacgtggacaggtgtgctagtccaggcagttcacttgcagtttccttgtcctcatgcttcggggatgggagccacgcctgaactagagttcaggctggatacatgtgctcacctgctgctcttgtcttcctaagagacagagagtggggcagatggaggagaagaaagtgaggaatgagtagcatagcattctgccaaaagggccccagattcttaatttagcaaactaagaagcccaattcaaaagcattgtggctaaagtctaacgctcctctcttggtcagataacaaaagccctccctgttggatcttttgaaataaaacgtgcaagttatccaggctcgtagcctgcatgctgccaccttgaatcccagggagtatctgcacctggaatagctctccacccctctctgcctccttactttctgtgcaagatgacttcctgggttaacttccttctttccatccacccacccactggaatctctttccaaacatttttccattttcccacagatgggctttgattagctgtcctctctccatgcctgcaaagctccagatttttggggaaagctgtacccaactggactgcccagtgaactgggatcattgagtacagtcgagcacacgtgtgtgcatgggtcaaaggggtgtgttccttctcatcctagatgccttctctgtgccttccacagcctcctgcctgattacaccactgcccccgccccaccctcagccatcccaattcttcctggccagtgcgctccagccttatctaggaaaggaggagtgggtgtagccgtgcagcaagattggggcctcccccatcccagcttctccaccatcccagcaagtcaggatatcagacagtcctcccctgaccctcccccttgtagatatcaattcccaaacagagccaaatactctatatctatagtcacagccctgtacagcatttttcataagttatatagtaaatggtctgcatgatttgtgcttctagtgctctcatttggaaatgaggcaggcttcttctatgaaatgtaaagaaagaaaccactttgtatattttgtaataccacctctgtggccatgcctgccccgcccactctgtatatatgtaagttaaacccgggcaggggctgtggccgtctttgtactctggtgatttttaaaaattgaatctttgtacttgcattgattgtataataattttgagaccaggtctcgctgtgttgctcag

SEQ ID NO: 37 - DNA, 2022 bp, Homo sapiens
  misc_feature: Incyte ID No: 997405.3
  unsure 1814, 1825, 1840, 1851, 1916, 1918-1919, 1924, 1965, 1969, 2001, 2006,2010, 2014, 2019: a, t, c, g, or other
ctaggggaggcgggcgagggcgtctgagctgaggcccgcgtcgatcctgggttggaggaggtggcggccgctgaggctgcggcgtgaagacggcgggcatggtggggcgggagaaagagctctctatacactttgttcccgggagctgtcggctggtggaggaggaagttaacatccctaataggagggttctggttactggtgccactgggcttcttggcagagctgtacacaaagaatttcagcagaataattggcatgcagttggctgtggtttcagaagagcaagaccaaaatttgaacaggttaatctgttggattctaatgcagttcatcacatcattcatgattttcagccccatgttatagtacattgtgcagcagagagaagaccagatgttgtagaaaatcagccagatgctgcctctcaacttaatgtggatgcttctgggaatttagcaaaggaagcagctgctgttggagcatttctcatctacattagctcagattatgtatttgatggaacaaatccaccttacagagaggaagacataccagctcccctaaatttgtatggcaaaacaaaattagatggagaaaaggctgtcctggagaacaatctaggagctgctgttttgaggattcctattctgtatggggaagttgaaaagctcgaagaaagtgctgtgactgttatgtttgataaagtgcagttcagcaacaagtcagcaaacatggatcactggcagcagaggttccccacacatgtcaaagatgtggccactgtgtgccggcagctagcagagaagagaatgctggatccatcaattaagggaacctttcactggtctggcaatgaacagatgactaagtatgaaatggcatgtgcaattgcagatgccttcaacctccccagcagtcacttaagacctattactgacagccctgtcctaggagcacaacgtccgagaaatgctcagcttgactgctccaaattggagaccttgggcattggccaacgaacaccatttcgaattggaatcaaagaatcactttggcctttcctcattgacaagagatggagacaaacggtctttcattagtctatttgtgttgggttcttttttttttaaatgaaaagtatagtatgtggcactttttaaagaacaaaggaaatagttttgtatgagtactttaattgtgactcttaggatctttcaggtaaatgatgctcttgcactagtgaaattgtctaaagaaactaaagggcagtcatgccctgtttgcagtaatttttctttttatcattttgtttgtcctggctaaacttggagtttgagtatagtaaattatgatccttaaatatttgagagtcaggatgaagcagacctgctgtagacttttcagatgaaattgttcattctcgtaacctccatattttcaggatttttgaagctgttgaccttttcatgttgattattttaaattgtgtgaaatagtataaaaatcattggtgtacattatttgctttgcctgagctcagatcaaaatgtttgaagaaaggaactttatttttgcaagttacgtacagtttttatgcttgagatatttcaacatgttatgtatattggaacttctacagcttgatgcctcctgcttttatagcagtttatggggagcacttgaaagagcgtgtgtacatgtattttttttctaggcaaacattgaatgcaaacgtgtatttttttaatataaatatataactgtccttttcatcccatgttgccgctaagtgatatttcatatgtgtggtnatactcataanaatgggccttgtagncttttcaccantcatgaataataataaatatgtactgctggcatgtaatgcttagttttcttgtatttacttcttntnntaaanttaaggaccaaacttctaaactaattgttcttttgttgctntaanttaaaaaaagaagtaaatacaagaaaactaangatgnacangccngcagnaca

SEQ ID NO: 38 - DNA, 4914 bp, Homo sapiens
  misc_feature: Incyte ID No: 235369.10
  unsure 3835, 3839, 3847, 3851-3852, 3855-3856: a, t, c, g, or other
agcgttccggaagggttacggaattttaccaggcttcaagggcgtgactgtgacagggttcaagtctggaagtgtggttgtgacatatgaagtcaagactacaccaccatcacttgagttaatacataaagccaatgaacaagttgtacagagcctcaatcagacctacaaaatggactacaactcctttcaagcagttactatcaatgaaagcaatttctttgtcacaccagaaatcatctttgaaggggacacagtcagtctggtgtgtgaaaaggaagttttgtcctccaatgtgtcttggcgctatgaagaacagcagttggaaatccagaacagcagcagattctcgatttacaccgcacttttcaacaacatgacttcggtgtccaagctcaccatccacaacatcactccaggtgatgcaggtgaatatgtttgcaaactgatattagacatttttgaatatgagtgcaagaagaaaatagatgttatgcccatccaaattttggcaaatgaagaaatgaaggtgatgtgcgacaacaatcctgtatctttgaactgctgcagtcagggtaatgttaattggagcaaagtagaatggaagcaggaaggaaaaataaatattccaggaacccctgagacagacatagattctagctgcagcagatacaccctcaaggctgatggaacccagtgcccaagcgggtcgtctggaacaacagtcatctacacttgtgagttcatcagtgcctatggagccagaggcagtgcaaacataaaagtgacattcatctctgtggccaatctaacaataaccccggacccaatttctgtttctgagggacaaaacttttctataaaatgcatcagtgatgtgagtaactatgatgaggtttattggaacacttctgctggaattaaaatataccaaagattttataccacgaggaggtatcttgatggagcagaatcagtactgacagtcaagacctcgaccagggagtggaatgggaacctatcactgcatatttagatataagaattcatacagtattgcaaccaaagacgtcattgttcacccgctgcctctaaagctgaacatcatggttgatcctttggaagctactgtttcatgcagtggttcccatcacatcaagtgctgcatagaggaggatggagactacaaagttactttccatatgggttcctcatcccttcctgctgcaaaagaagttaacaaaaaacaagtgtgctacaaacacaatttcaatgcaagctcagtttcctggtgttcaaaaactgttgatgtgtgttgtcactttaccaatgctgctaataattcagtctggagcccatctatgaagctgaatctggttcctggggaaaacatcacatgccaggatcccgtaataggtgtcggagagccggggaaagtcatccagaagctatgccggttctcaaacgttcccagcagccctgagagtcccattggcgggaccatcacttacaaatgtgtaggctcccagtgggaggagaagagaaatgactgcatctctgccccaataaacagtctgctccagatggctaaggctttgatcaagagcccctctcaggatgagatgctccctacatacctgaaggatctttctattagcatagacaaagcggaacatgaaatcagctcttctcctgggagtctgggagccattattaacatccttgatctgctctcaacagttccaacccaagtaaattcagaaatgatgacgcacgtgctctctacggttaatgtcatccttggcaagcccgtcttgaacacctggaaggttttacaacagcaatggaccaatcagagttcacagctactacattcagtggaaagattttcccaagcattacagtcaggagatagccctcctttgtccttctcccaaactaatgtgcagatgagcagcacggtaatcaagtccagccacccagaaacctatcaacagaggtttgttttcccatactttgacctctggggcaatgtggtcattgacaagagctatctagaaaacttgcagtcggattcgtctattgtcaccatggctttcccaactctccaagccatccttgctcaggatatccaggaaaataactttgcagagagcttagtgatgacaaccactgtcagccacaatacgactatgccattcaggatttcaatgacttttaagaacaatagcccttcaggcggcgaaacgaagtgtgtcttctggaacttcaggcttgccaacaacacaggggggtgggacagcagtgggtgctatgtagaagaaggtgatggggacaatgtcacctgtatctgtgaccacctaacatcattctccatcctcatgtcccctgactccccagatcctagttctctcctgggaatactcctggatattatttcttatgttggggtgggcttttccatcttgagcttggcagcctgtctagttgtggaagctgtggtgtggaaatcggtgaccaagaatcggacttcttatatgcgccacacctgcatagtgaatatcgctgcctcccttctggtcgccaacacctggttcattgtggtcgctgccatccaggacaatcgctacatactctgcaagacagcctgtgtggctgccaccttcttcatccacttcttctacctcagcgtcttcttctggatgctgacactgggcctcatgctgttctatcgcctggttttcattctgcatgaaacaagcaggtccactcagaaagccattgccttctgtcttggctatggctgcccacttgccatctcggtcatcacgctgggagccacccagccccgggaagtctatacgaggaagaatgtctgttggctcaactgggaggacaccaaggccctgctggctttcgccatcccagcactgatcattgtggtggtgaacataaccatcactattgtggtcatcaccaagatcctgaggccttccattggagacaagccatgcaagcaggagaagagcagcctgtttcagatcagcaagagcattggggtcctcacaccactcttgggcctcacttggggttttggtctcaccactgtgttcccagggaccaaccttgtgttccatatcatatttgccatcctcaatgtcttccagggattattcattttactctttggatgcctctgggatctgaaggtacaggaagctttgctgaataagttttcattgtcgagatggtcttcacagcactcaaagtcaacatccctgggttcatccacacctgtgttttctatgagttctccaatatcaaggagatttaacaatttgtttggtaaaacaggaacgtataatgtttccaccccagaagcaaccagctcatccctggaaaactcatccagtgcttcttcgttgctcaactaagaacaggataatccaacctacgtgacctcccggggacagtggctgtgcttttaaaaagagatgcttgcaaagcaatggggaacgtgttctcggggcaggtttccgggagcagatgccaaaaagactttttcatagagaagaggctttcttttgtaaagacagaataaaaataattgttatgtttctgtttgttccctccccctcccccttgtgtgataccacatgtgtatagtatttaagtgaaactcaagccctcaaggcccaacttctctgtctatattgtaatatagaatttcgaagagacattttcactttttacacattgggcacaaagataagctttgattaaagtagtaagtaaaaggctacctaggaaatacttcagtgaattctaagagggnaggnaggaaganaggnnggnnagaagggagggaaacagggagaaagggaaaaagaagaaaaagagaaagatgaaaataggaacaaataaagacaaacaacattaagggccatattgtaagatttccatgttaatgatctaatataatcactcagtgcaacattgagaatttttttttaatggctcaaaaatggaaactgaaagcaagtcatggggaatgaatactttgggcagtatcttcctgatgtcttcttagctaagaggaggaaaaaaaggctgaaaaaatagggaggaaattccttcatcagaacgacttcaagtggataacaatatttataagaaatgaatggaaggaaatatgatcctcctgagactaactttgtatgttaaggtttgaactaagtgaatgtatctgcagaggaagtattataaagatatgtcattagatccaagtgctgattaaatttttatagtttatcagaaaagccttatattttagtttgttccacattttgaaagcaaaaaatatatatttgatatacccttcaattgccaaatttgatatgttgcactgaagacagaccctgtcatatatttaatggcttcaagcaggtacttctctgtgcattatagaatagattttaataatcttatagcattgtatattattattgctgttgtcactgttattattattgtggatactggcccttggtgtgttgcatagctccctatgtattctctgtttccatctttaagttcccagaccaatatacattaagagttttgcatggtctaaattgtgtttattccaaccacgtggaaagctcctggaaagaaattttacattcggttgttctgtgctcctaatgacacttgaccttgttgaacaaatggcagagcctttcccaaggatttgattgtttgtgaattatctgcatgtgtgcttttttttggtgtgtatttcattaaaaaatataaatatttatgaaaattgcacgcatattagagttaaccatgtactattgatacagcaacgctacattgcaaataaaagtccgatcccaaaaggagaatgag

SEQ ID NO: 39 - DNA, 2762 bp, Homo sapiens
  misc_feature: Incyte ID No: 236587.4
tccccttcactgtgtcactggacaacggccactccttccctcgtgcgggcacctggctggctgtgcaccccaacaaagtgtcaatgatggagaagagcgagttggtgaacgagacgcgttggcaatactacggcaccgccaacacctcaggcaacctcagcctgacctggcatgtcaagtcgctgcccacgcagaccatcaccatcgaactgtggggctacgaggagacaggaatgccctactcacaggagtggactgcaaagtggtcgtacctgtacccctggccacacacatccccaactccggctctttcactttcaccccaaaacctgctcctcccagctaccagagatggcgagtgggtgcacttcggatcatcgacagcaaaaattacgcagggcagaaggacgtgcaggcgctctggaccaacgaccacgcactggcctggcacctgagcgatgacttccgagaggaccctgtggcctgggcacgaactcagtgccaggcctgggaggagctggaggatcagctgcccaacttcctggaggagctgccggactgcccctgcaccctgacccaggcccgggctgactccggccgcttcttcacggactacggctgtgacatggagcagggcagcgtgtgcacctaccaccccggggccgtgcactgtgtgcgttctgtgcaggccagcctccggtacggctcaggtcagcagtgctgctacacagcggacgggacgcagctcctgacagctgactccagcggcggcagcactcccgaccgcggccatgactggggcgcacccccgttccgcacgccaccccgagtgcccagcatgtcccactggctctacgatgtcctcagcttctattactgctgcctctgggcacccgactgcccccgctacatgcaacggcggccctccaatgactgccgcaactaccggcccccaagactggcctccgccttcggagacccacactttgtgaccttcgacggcaccaacttcacattcaatgggcgcggagagtacgtgctgctggaggcagcgctgaccgacctgagggtgcaggcgcgggcccagcccgggacgatgtccaacggcacggagacccgtggcactgggctgaccgcagtggccgtccaggagggcaactcagatgtggtggaagtcaggctggccaacaggaccggaggtctggaggtgctgctgaaccaggaggtgctgagcttcaccgagcagagctggatggacctgaaaggaatgttcctgtcggtggctgccggggacagggtctccatcatgctggcatcaggggccggcctggaggtcagcgtgcagggcccgttcctgagtgtgtccgtcctgctgcctgagaagttcctcacccacacccacggcctcctcgggacactcaacaacgaccccaccgacgacttcaccctgcacagcgggcgcgtcctgcccccaggcaccagtccccaggagctgttcctgtttggggccaactggaccgtgcacaatgcgtcctccctgctcacctacgattcctggttcctggtccacaacttcctgtaccaacccaagcacgaccccaccttcgagcccctcttccccagtgagaccaccctcaaccccagcctggcacaagaggcagccaaactatgtggggacgatcatttctgcaactttgatgtggcagccactgggagcctgagcacgggcactgccactcgggtggcccaccagctgcaccagcgtcgcatgcagagcctgcagccagtggtgtcctgtggctggctggccccacctcccaacggacaaaaggagggcaacaggtacctggcgggttccaccatctacttccactgtgacaacggctacagcctggccggggcagagaccagcacctgccaggctgacggcacctggtcctcacccaccccgaagtgccagccaggacgcagctacgcggtgctgttgggcatcatctttgggggcctcgcggtggtggcggcggttgcgctcgtctatgtgctgctgcgccgcaggaagggcaacacgcacgtctggggtgcacagccctgatgggagcagcttggctgtgagcaccaggccaagactcctgagaacaggcagcccagtcctgcgactcccgcatccccaggaccagacacctgggacctggatacttgatacctgggcatttaaccccctactctgtcatctcagaccccaggcaggaggcccagtgttccaacacccaagccccgtgctagcagcgctccgtgctcttccccaaatactcacggctctaattccccaaacctgaaacttcataccctgggattctaatacctatgtcctgagccctgacactcccacacctgagcctcagattccaatagctcactccctagagcctgacgccggggcccctgacccctgagcctcagattccaatacctcactccccagagcctgatgccggggcccctgacccctgatctacggaggcctgctcccggaccgtgcgggcaccagtgcagtgctgccttggttcctggacccctgggcccatcctgggaccccagatggggtaaggagaggccccagaaccccaaagcagacagcgagacccccagcggcagagacctccctcggcactccaggcttataatttcgaactcttctggaaggtcactcaggaacaccctccctgcctgtgcaaagagaaaacaagcgccttgtttccttc

SEQ ID NO: 40 - DNA, 3211 bp, Homo sapiens
  misc_feature: Incyte ID No: 1135936.1
  unsure 1650, 1661: a, t, c, g, or other
atgcaaaagtcaaagtaggtaacaggttggtaattaagtgtcaggaagactggaagaggcaaaaatcaagcagagttccaataagtgtatgaaaaaaaaatcataactgaaggtttaagaaagtccccaaggcagaatcacaatatgagcaggaggaataaaaagcttttggatataccaggcagctttctgtacgactcaggtttacaggtgaaattcctcagtttgagttcagaagaatttgaacttattccagctaaaatactgtcaatctttttattactgcctcctcccccatcttctgtctgggcaaagagatgcttggacttaggtccaaagctcctgccagggggagggaccatgtgtcacagcataacagacgcttgcaagtgctttactgagcagggctcaggtttgcagcaactctgataggctcacacaatggcctccattttacagcccctccttggaggcccactgatcagctgaaatgggaacacatgttgagccactaaccaccccggtgatggattagtttggattcaggaaagcgtgattattcttgaaataaacgaagctgaatagacatgctgacctcattcagttgatgagaggcagggaaagctggcttccaggactgccagcccacagagagctcagccctattggtccactttaattcatttcattgggctagtgtcaaccatacccactacggataaagatgttgccagatgaagcccagaagtgagcttcaccagactctgtagctcagagtcagaaacacgcatggaaaactaggtcatgggtattctaattttggtcttcagggaggctgctgacctaaagcgagttgctgagttagaccctatttgaaaaggaaaatgtgaaaaacaggaaggcactgaggtcttgttatctacataacaaatattcaggcacagaaaatatcataggttaaaatttcaagaagagtaaggcattagttggatcatgagaaggcagaagattatgttttctaacttgtaaggatcactggatcctactggattatgaagtgaatggcagtaatccactaactccttaaacagtgggaaaagagtgtgctgaaaatctgcccacatacttgtacactccatggccataccctggaattcttcccttaacataaaatgaccaacattttggagtaggcagttgaggttgttggttcttttcttttttttttttttcctcctcagttcttcatatttctctcaaattacctttcagcaatatgttcatatctcagccaataaagcgagtggttgatccacatgtgcaaataaaagggtaggaaagaaatataaatgggttttaaaaattcagactgccaaaaatagatgaaatagctcagaagagacataatatttatgaattgaattatcttggttgaaaataaaaagatcactttctcagttttcataagtattatgtctcttctgagctatttcatctatttttggcagtctgaatttttaaaacccatttaaatttttttccttacctttttatttgcatgtggatcaaccatcgctttattggctgagatatgaacatattgttgaaaggtaatttgagagaaatatgaagaactgaggagggaaaaanaaaaaaaaganaagaaccaacaacctcaactgcctactccaaaatgttggtcattttatgttaagggaagaattccagggtatggccatggagtgtacaagtatgtgggcagattttcagcaaactcttttcccactgtttaaggagttagtggattactgccattcacttcataatccagtaggatccagtgatccttacaagttagaaaacataatcttctgccttctcatgatccaactaatgccttactcttcttgaaattttaacctatgatattttctgtgcctgaatatttgttatgtagataacaagacctcagtgccttcctgtttttcacattttccttttcaaatagggtctaactcagcaactcgctttaggtcagcagcctccctgaagaccaaaattagaatatccatgacctagttttccatgcgtgtttctgactctgagctacagagtctggtgaagctcacttctgggcttcatctggcaacatctttatccgtagtgggtatggttgacactagcccaatgaaatgaattaaagtggaccaatagggctgagctctctgtgggctggcagtcctggaagccagctttccctgcctctcatcaactgaatgaggtcagcatgtctattcagcttcgtttattttcaagaataatcacgctttcctgaatccaaactaatccatcaccggggtggtttagtggctcaacattgtgttcccatttcagctgatcagtgggcctccaaggaggggctgtaaaatggaggccattgtgtgagcctatcagagttgctgcaaacctgacccctgctcagtaaagcacttgcaaccgtctgttatgctgtgacacatggcccctccccctgccaggagctttggacctaatccaagcatccctttgcccagaaagaagatgggggaggaggcagtaataaaaagattgaagtattttgctggaataagttcaaattcttctgaactcaaactgaggaatttcacctgtaaacctgagtcgtacagaaagctgcctggtatatccaaaagctttttattcctcctgctcatattgtgattctgcctttggggacttttcttaaaccttcagttatgatttttttttcatacacttattggaactctgcttgatttttgcctcttccagtcttcctgacactttaattaccaacctgttacctactttgactttttgcatttaaaacagacactggcatggatatagttttacttttaaactgtgtacataactgaaaatgtgctatactgcatactttttaaatgtaaagatatttttatctttatatgaagaaaatcacttaggaaatggctttgtgattcaatctgtaaactgtgtattccaagacatgtctgttctacatagatgcttagtccctcatgcaaatcaattactggtccaaaagattgctgaaattttatatgcttactgatatattttacaattttttatcatgcatgtcctgtaaaggttacaagcctgcacaataaaaatgtttaacggttaaaaa

SEQ ID NO: 41 - DNA, 2502 bp, Homo sapiens
  misc_feature: Incyte ID No: 251123.6
ccttcctcaaccgctacgtgcccttcgacgccgccgtggacttccatcgcctcattgcctccaccgccatcgtcctcacagtcttacacagtgtgggccatgtggtgaatgtgtacctgttctccatcagccccctcagcgtcctctcttgcctctttcctggcctcttccatgatgatgggtctgagttcccccagaagtattactggtggttcttccagaccgtaccaggcctcacgggggttgtgctgctcctgatcctggccatcatgtatgtctttgcctcccaccacttccgccgccgcagtttccggggcttctggctgacccaccacctctacatcctgctctatgtcctgctcatcatccatggtagctttgccctgatccagctgccccgtttccacatcttcttcctggtcccagcaatcatctatgggggcgacaagctggtgagcctgagccggaagaaggtggagatcagcgtggtgaaggcggagctgctgccctcaggagtgacccacctgcggttccagcggccccagggctttgagtacaagtcagggcagtgggtgcggatcgcttgcctggctctggggaccaccgagtaccaccccttcacactgacctctgcgccccatgaggacacgcttagcctgcacatccgggcagcagggccctggaccactcgcctcagggagatctactcagccccgacgggtgacagatgtgccagatacccaaagctgtaccttgatggaccatttggagagggccaccaggagtggcataagtttgaggtgtcagtgttagtgggagggggcattggggtcaccccttttgcctccatcctcaaagacctggtcttcaagtcatccgtcagctgccaagtgttctgtaagaagatctacttcatctgggtgacgcggacccagcgtcagtttgagtggctggctgacatcatccgagaggtggaggagaatgaccaccaggacctggtgtctgtgcacatctacatcacccagctggctgagaagttcgacctcaggaccactatgctgtacatctgtgagcggcacttccagaaggttctgaaccggagtctattcacaggcctgcgctccatcacccactttggccgtcccccctttgagcccttcttcaactccctgcaggaggtccacccccaggtccggaagatcggggtgtttagctgtggcccccctggcatgaccaagaatgtggaaaaggcctgtcagctcatcaacaggcaggaccggactcacttctcccaccattatgagaacttctaggcccctgcccgggggttctgcccactgtccagttgagcagaggtttgagcccacacctcacctctgttcttcctatttctggctgcctcagccttctctgatttcccacctcccaaccttgttccaggtggccatagtcagtcaccatgtgtgggctcagggacccccaggaccaggatgtgtctcagcctggagaaatggtgggggggcagtgtctagggactagagtgagaagtaggggagctactgatttggggcaaagtgaaacctctgcttccagacttcagaaacaaatctcagaagacaagctgacctgacaagtactatgtgtgtgcatgtctgtatgtgtgttggggcggtgagtgtaaggatgcagtgggagcatggatgctggcatcttagaaccctccctactcccatacctcctcctcttctgggctccccactgtcagacgggctggcaaatgccttgcaggaggtagaggctggacccatggcaagccatttacagaaacccactcggcaccccagtctaacaccacaactaatttcacccaaggttttaagcacgttctttcatcagaccctggcccaatacctatgtatgcaatgctcctcagccctcttctccctgctccagtagtctcccttccaaataaatcacttttctgccttcagggtttctttattctgccctaggaccggaaggggcatggggagaggaagccactaacccagccagctcaccaggctggcccagacatctctcaagctgcccagtgtcctgagtaaaggagctggcccaaggcaaagtgccccagctagcaatcccttccccggcccaggggtgcccttcctgacagagggcctgtcagccactagtgtgaggcctggtgagcctgctcaggaggggcagaaacagagggtgtggaagcttctggaggaggttggctggggaagagaacggggtcgggggcagactcagctggagtctatagggagccagagccgcctggcttgttaccaggacctcagtcactcccagcccttctctgagcaaagggagagttgggcacctgtgcctacatggctcttccaggcagtgagatgatagcaggagacaaatgaacacatcacccaacctctctgggcctgttttctcatctgcaaatggctggatgctctccaa

SEQ ID NO: 42 - DNA, 1660 bp, Homo sapiens
  misc_feature: Incyte ID No: 2547002CB1
gcgacgtacaacagattggagccatggctttggaacagaaccagtcaacagattattattatgaggaaaatgaaatgaatggcacttatgactacagtcaatatgaactgatctgtatcaaagaagatgtcagagaatttgcaaaagttttcctccctgtattcctcacaatagttttcgtcattggacttgcaggcaattccatggtagtggcaatttatgcctattacaagaaacagagaaccaaaacagatgtgtacatcctgaatttggctgtagcagatttactccttctattcactctgcctttttgggctgttaatgcagttcatgggtgggttttagggaaaataatgtgcaaaataacttcagccttgtacacactaaactttgtctctggaatgcagtttctggcttgtatcagcatagacagatatgtggcagtaactaaagtccccagccaatcaggagtgggaaaaccatgctggatcatctgtttctgtgtctggatggctgccatcttgctgagcataccccagctggttttttatacagtaaatgacaatgctaggtgcattcccattttcccccgctacctaggaacatcaatgaaagcattgattcaaatgctagagatctgcattggatttgtagtaccctttcttattatgggggtgtgctactttatcacagcaaggacactcatgaagatgccaaacattaaaatatctcgacccctaaaagttctgctcacagtcgttatagttttcattgtcactcaactgccttataacattgtcaagttctgccgagccatagacatcatctactccctgatcaccagctgcaacatgagcaaacgcatggacatcgccatccaagtcacagaaagcatcgcactctttcacagctgcctcaacccaatcctttatgtttttatgggagcatctttcaaaaactacgttatgaaagtggccaagaaatatgggtcctggagaagacagagacaaagtgtggaggagtttccttttgattctgagggtcctacagagccaaccagtacttttagcatttaaaggtaaaactgctctgccttttgcttggatacatatgaatgatgctttcccctcaaataaaacatctgcattattctgaaactcaaatctcagacgccgtggttgcaacttataataaagaatgggttgggggaagggggagaaataaaagccaagaagaggaaacaagataataaatgtacaaaacatgaaaattaaaatgaacaatataggaaaataattgtaacaggcataagtgaataacactctgctgtaacgaagaagagctttgtggtgataattttgtatcttggttgcagtggtgcttatacaaatctacacaagtgataaaatgacagagaactatatacacacattgtaccaatttcaatttcctggttttgacattatagtataattatgtaagatggaaccattggggaaaactgggtgaagggtacccaggaccactctgtaccatctttgtaacttcctgtgaatttataataatttcaaaataaaacaagttaaaaaaaaaacccactatgctataagttaggccatctaaaacagattattaaagaggttcatgttaaaaggcatgc

SEQ ID NO: 43 - DNA, 1666 bp, Homo sapiens
  misc_feature: Incyte ID No: 251123.8
gtcgctgttatcaacattgaccccagtgctctgcagcccaatgtctttgtctggcataaaggagacccctgtccgcagccgagacagctcagcactgaaggcctgccagcgtgtgctccctctgttgttcgtgactattttgagggcagtggatttggcttcggggtcaccatcgggaccctctgttgcttccctttggtgagcctgctcagtgcctggattgttgcccggctccggatgagaaatttcaagaggctccagggccaggaccgccagagcatcgtgtctgagaagctcgtgggaggcatggaagctttggaatggcaaggccacaaggagccctgccggcccgtgcttgtgtacctgcagcccgggcagatccgtgtggtagatggcaggctcaccgtgctccgcaccatccagctgcagcctccacagaaggtcaacttcgtcctgtccagcaaccgtggacgccgcactctgctgctcaagatccccaaggagtatgacctggtgctgctgtttaacttggaggaagagcggcaggcgctggtggaaaatctccggggagctctgaaggagagcgggttgagcatccaggagtgggagctgcgggagcaggagctgatgagagcagctgtgacacgggagcagcggaggcacctcctggagacctttttcaggcaccttttctcccaggtgctggacatcaaccaggccgacgcagggaccctgcccctggactcctcccagaaggtgcgggaggccctgacctgtgagctgagcagggccgagtttgccgagtccctgggcctcaagccccaggacatgtttgtggagtccatgttctctctggctgacaaggatggcaatggctacctgtccttccgagagttcctggacatcctggtggtcttcatgaaaggctctcctgaggaaaagtctcgccttatgttccgcatgtacgactttgatgggaatggcctcatttccaaggatgagttcatcaggatgctgagatccttcatcgagatctccaacaactgcctgtccaaggcccagctggctgaggtggtggagtccatgttccgggagtcgggattccaggacaaggaggaactgacatgggaagattttcacttcatgctgcgggaccacaatagcgagctccgcttcacgcagctctgtgtcaaaggggtggaggtgcctgaagtcatcaaggacctctgccggcgagcctcctacatcagccaggatatgatctgtccctctcccagagtgagtgcccgctgttcccgcagcgacattgagactgagttgacacctcagagactgcagtgccccatggacacagaccctccccaggagattcggcggaggtttggcaagaaggtaacgtcattccagcccttgctgttcactgaggcgcaccgagagaagttccaacgcagctgtctccaccagacggtgcaacagttcaagcgcttcattgagaactaccggcgccacatcggctgcgtggccgtgttctacgccatcgctggggggcttttcctggagagggcctactactacgcctttgccgcacatcacacgggcatcacggacaccacccgcgtgggaatcatcctgtcgcggggcacagcagccagcatctctttcatgt

SEQ ID NO: 44 - DNA, 362 bp, Homo sapiens
  misc_feature: Incyte ID No: 1000172.35
  unsure 23, 28, 64, 72, 154, 171, 175, 356: a, t, c, g, or other
ggcatccagacagacggtgtgancaggngccccacagacagaggggaactttgaagctcagagnggtaagcnagtccatcagggcagtgcagagagcatcatgcttgcccttggtggagggtgcgggagagggacttgccccacagaggcgggnagacagaacccctcgangganagagcaggaaagaggacaaggggtgggggtctcagcaggggcaaggcttcactaaagaataggggaccacggggtgtggagacacactggaatcttgtggaccctctgagcctagggtctgggtggcgcctaacagcaatgaaagggcagagttccaggattgcagatggcaaaacacctncgtggc

SEQ ID NO: 45 - DNA, 1142 bp, Homo sapiens
  misc_feature: Incyte ID No: 2921920CB1
ggagctccgagtgtccacaggaagggaactatcagctcctggcatctgtaaggatgctgtccatgctgaggacaatgaccagactctgcttcctgttattcttctctgtggccaccagtgggtgcagtgcagcagcagcctcttctcttgagatgctctcgagggaattcgaaacctgtgccttctccttttcttccctgcctagaagctgcaaagaaatcaaggaacgctgccatagtgcaggtgatggcctgtattttctccgcaccaagaatggtgttgtctaccagaccttctgtgacatgacttctgggggtggcggctggaccctggtggccagcgtgcacgagaatgacatgcatgggaagtgcacggtgggtgatcgctggtccagtcagcagggcaacaaagcagactacccagagggggatggcaactgggccaactacaacacctttggatctgcagaggcggccacgagcgatgactacaagaaccctggctactacgacatccaggccaaggacctgggcatctggcatgtgcccaacaagtcccccatgcagcattggagaaacagcgccctgctgaggtaccgcaccaacactggcttcctccagagactgggacataatctgtttggcatctaccagaaatacccagtgaaatacagatcagggaaatgttggaatgacaatggcccagccatacctgtggtctatgactttggtgatgctaagaagactgcatcttattactcaccgtatggtcaacgggaatttgttgcaggattcgttcagttccgggtgtttaataacgagagagcagccaacgccctttgtgctgggataaaagttactggctgtaacactgagcatcactgcatcggtggaggagggttcttcccacagggcaaaccccgtcagtgtggggacttctccgcctttgactgggatggatatggaactcacgttaagagcagctgcagtcgggagataacggaggcggctgtactcttgttctatagatgagacagagctctgcggtgtcagggcgagaacccatcttccaaccccggctatttggagacggaaaaactggaattctaacaaggaggagaggagactaaatcacatcaattc

SEQ ID NO: 46 - DNA, 1170 bp, Homo sapiens
  misc_feature: Incyte ID No: 631645CB1
cccacgcgtccgcggacggtggcgacgtggcctcagtgcttaccagagcgcgttgtctaccctgtaccgaagacagaggctgtggggacagcctaggggcctggatctattgcctacttagagagaggccaactcagacacagccgtgtatgctcccagcagcaacggaggttcagctccgcctgcagggacagaaagacatggtctggaaatggatgccacttctgctgcttctggtctgtgtagccaccatgtgcagtgcccaggacaggactgatctcctcaatgtctgtatggatgccaagcaccacaagacaaagccaggtcctgaggacaagctgcatgaccaatgcagtccctggaagaagaatgcctgctgcacagccagcaccagccaggagctgcacaaggacacctcccgcctgtacaactttaactgggaccactgcggcaagatggagcccgcctgcaagcgccacttcatccaggacacctgtctctatgagtgctcacccaacctggggccctggatccagcaggtgaatcagagctggcgcaaagaacgcttcctggatgtgcccttatgcaaagaggactgtcagcgctggtgggaggattgtcacacctcccacacgtgcaagagcaactggcacagaggatgggactggacctcaggagttaacaagtgcccagctggggctctctgccgcacctttgagtcctacttccccactccagctgccctttgtgaaggcctctggagtcactcatacaaggtcagcaactacagccgagggagcggccgctgcatccagatgtggtttgattcagcccagggcaaccccaacgaggaagtggcgaggttctatgctgcagccatgcatgtgaatgctggtgagatgcttcatgggactgggggtctcctgctcagtctggccctgatgctgcaactctggctccttggctgagttcagtcctcccagactacctgccctcagcttggataaccaggctgggctcagctcagctcccacaaatgacagccccttaagcatgcttctattagtcacctaaccctctgtcacccagtctgttgctgctccatggtggggccaagagtcacttctaataaacagactgttttctaataattccaaaaaaaaaaaaaaa

SEQ ID NO: 47 - DNA, 1313 bp, Homo sapiens
  misc_feature: Incyte ID No: 1507546CB1
gtgcctgccaagcaaaggctagtttgcttggagctcctggggcctaacaaaaagaaacctgccatgctgctcttcctcctctctgcactggtcctgctcacacagcccctgggctacctggaagcagaaatgaagacctactcccacagaacaatgcccagtgcttgcaccctggtcatgtgtagctcagtggagagtggcctgcctggtcgcgatggacgggatgggagagagggccctcggggcgagaagggggacccaggtttgccaggagctgcagggcaagcagggatgcctggacaagctggcccagttgggcccaaaggggacaatggctctgttggagaacctggaccaaagggagacactgggccaagtggacctccaggacctcccggtgtgcctggtccagctggaagagaaggtcccctggggaagcaggggaacataggacctcagggcaagccaggcccaaaaggagaagctgggcccaaaggagaagtaggtgccccaggcatgcagggctcggcaggggcaagaggcctcgcaggccctaagggagagcgaggtgtccctggtgagcgtggagtccctggaaacgcaggggcagcagggtctgctggagccatgggtccccagggaagtccaggtgccaggggacccccgggattgaagggggacaaaggcattcctggagacaaaggagcaaagggagaaagtgggcttccagatgttgcttctctgaggcagcaggttgaggccttacagggacaagtacagcacctccaggctgctttctctcagtataagaaagttgagctcttcccaaatggccaaagtgtcggggagaagattttcaagacagcaggctttgtaaaaccatttacggaggcacagctgctgtgcacacaggctggtggacagttggcctctccacgctctgccgctgagaatgccgccttgcaacagctggtcgtagctaagaacgaggctgctttcctgagcatgactgattccaagacagagggcaagttcacctaccccacaggagagtccctggtctattccaactgggccccaggggagcccaacgatgatggcgggtcagaggactgtgtggagatcttcaccaatggcaagtggaatgacagggcttgtggagaaaagcgtcttgtggtctgcgagttctgagccaactggggtgggtggggcagtgcttggcccaggagtttggccagaagtcaaggcttagaccctcatgctgccaatatcctaataaaaaggtgaccatatgtgccgggaaaaaaaaaaaa

SEQ ID NO: 48 - DNA, 1160 bp, Homo sapiens
  misc_feature: Incyte ID No: 1508437CB1
ccagacggagagccacctcctctcccaggaactgaacccaaaggatcacctggtattccctgagagtacagatttctccggcgtggccctcaagggacagacatggctcagcggatgacaacacagctgctgctccttctagtgtgggtggctgtagtaggggaggctcagacaaggattgcatgggccaggactgagcttctcaatgtctgcatgaacgccaagcaccacaaggaaaagccaggccccgaggacaagttgcatgagcagtgtcgaccctggaggaagaatgcctgctgttctaccaacaccagccaggaagcccataaggatgtttcctacctatatagattcaactggaaccactgtggagagatggcacctgcctgcaaacggcatttcatccaggacacctgcctctacgagtgctcccccaacttggggccctggatccagcaggtggatcagagctggcgcaaagagcgggtactgaacgtgcccctgtgcaaagaggactgtgagcaatggtgggaagattgtcgcacctcctacacctgcaagagcaactggcacaagggctggaactggacttcagggtttaacaagtgcgcagtgggagctgcctgccaacctttccatttctacttccccacacccactgttctgtgcaatgaaatctggactcactcctacaaggtcagcaactacagccgagggagtggccgctgcatccagatgtggttcgacccagcccagggcaaccccaatgaggaggtggcgaggttctatgctgcagccatgagtggggctgggccctgggcagcctggcctttcctgcttagcctggccctaatgctgctgtggctgctcagctgacctccttttaccttctgatacctggaaatccctgccctgttcagccccacagctcccaactatttggttcctgctccatggtcgggcctctgacagccactttgaataaaccagacaacgcacaaaaaaaaaaacatcacccccaccccccccccccccctacgcccctccctccccagccactccacaaaaaaaagcggtggcccccggtctatttgccctcctttcccccgggaactaaattccgggaccgggtccttccaggcggtacaagtttttccctt

SEQ ID NO: 49 - DNA, 1049 bp, Homo sapiens
  misc_feature: Incyte ID No: 1100669.4
cttctttctagaaggcagggccaggatgctgcgtgggtgttccctggcagagaggctctgtggccctcaggacttcatccttctgcaggcttgtgtgtttgttttatttttttggcacgcctgcagccaagttggggagggtttcctggacagaggtcctttggctgctgccttaagacgtgcagcctggggccgtggctgtccactgcgttcggcacccagacccgctgcaggcagcagcagcccccgcccgcgcagcagccatggagctctggggggcctacctcctcctctgcctcttctccctcctgacccaggtcaccaccgagccaccaacccagaagcccaagaagattgtaaatgccaagaaagatgttgtgaacacaaagatgtttgaggagctcaagagccgtctggacaccctggcccaggaggtggccctgctgaaggagcagcaggccctgcagacggtctgcctgaaggggaccaaggtgcacatgaaatgctttctggccttcacccagacgaagaccttccacgaggccagcgaggactgcatctcgcgcgggggcaccctgggcacccctcagactggctcggagaacgacgccctgtatgagtacctgcgccagagcgtgggcaacgaggccgagatctggctgggcctcaacgacatggcggccgagggcacctgggtggacatgaccggcgcccgcatcgcctacaagaactgggagactgagatcaccgcgcaacccgatggcggcaagaccgagaactgcgcggtcctgtcaggcgcggccaacggcaagtggttcgacaagcgctgccgcgatcagctgccctacatctgccagttcgggatcgtgtagccggcggggcgggggccgtggggggcctggaggagggcaggggccgcgggaggccgggaggagggtggggaccttgcagcccccatcctctccgtgcgcttggagcctctttttgcaaataaagttggtgcagcttcgcggagaggaaaaacaaaaaaaaaaaagaaaaaaaaaaaa

SEQ ID NO: 50 - DNA, 1448 bp, Homo sapiens
  misc_feature: Incyte ID No: 124600CB1
  unsure 1164: a, t, c, g, or other
gcccgccccagcagtggctgcaccatgcacgtgaacggcaaagtggcgctggtgaccggcgcggctcagggcataggcagagcctttgcagaggcgctgctgcttaagggcgccaaggtagcgctggtggattggaatcttgaagcaggtgtacagtgtaaagctgccctggatgagcagtttgaacctcagaagactctgttcatccagtgcgatgtggctgaccagcaacaactgagagacacttttagaaaagttgtagaccactttggaagactggacattttggtcaataatgctggagtgaataatgagaaaaactgggaaaaaactctgcaaattaatttggtttctgttatcagtggaacctatcttggtttggattacatgagtaagcaaaatggaggtgaaggcggcatcattatcaatatgtcatctttagcaggactcatgcccgttgcacagcagccggtttattgtgcttcaaagcatggcatagttggattcacacgctcagcagcgttggctgctaatcttatgaacagtggtgtgagactgaatgccatttgtccaggctttgttaacacagccatccttgaatcaattgaaaaagaagaaaacatgggacaatatatagaatataaggatcatatcaaggatatgattaaatactatggaattttggacccaccattgattgccaatggattgataacactcattgaagatgatgctttaaatggtgctattatgaagatcacaacttctaagggaattcattttcaagactatgatacaactccatttcaagcaaaaacccaatgaacagcttatgtgttagccatagctgaaaataagcacaaatagcttatattcagatcctatcttcatttgaatatagcttttaaatgaaatgttacagaatgaagttttccttcatgcacttggtgataaacgtcttctaaattttcagttaagtatatggataaaaagttatgaactattaaaaatgtgatgtggaccaaaggctaggttgtaatcttgatagtctaaaaatgatcacaacaaatgattttcaaggaatattcactattctgccttccagaaagtgtatttatatctgggcttcaaaaatatcaatgttcttcagaacatcactttaanggagatactcgactcgctatctaactcaccccagatgttacacactcacattcacgttcatactttcaaagaggaaagtcatcaacaatgacacttttccacactaatcatctccattttctcccactcccactggacaactcaggcttcaagggttcttaggtcgatttttcgcggcaggacagactccttcaaggccccatatccggctaactctcgttttgcaaatcagaacacactcatcacatcggccaaaaccaaccccttctgaaacgacacttcct

SEQ ID NO: 51 - DNA, 1444 bp, Homo sapiens
  misc_feature: Incyte ID No: 470771.11
gcatcgacgaggttgtggagaagggaggcccgtaccctcaggtcatcctgccacagtttgggggctattggatcgaggacccggagaacgtgggcaccccaacatcgctggggagcagcatctgtgaggaggaggaagaggacaacctcagccccaacacatttggctacaagctcgagtgcaagggtgaagccagggcctaccggaggcacttcctggggaaggatcatctaaacttttactgtaccggcagcagcctggggaacttgatcctgtccgtcaagtgcgaggaagcagaggggatcgagtacctccgggtcatcctcgaggtccaaaatgaagacggtacatgagcggatccccttggctggactgagcaagcttcccagtgtccctcagattgcaaaggctttctgtgatgatgcagtgggactgagattcaatcctgtcctgtaccccaaggcctcccaaatgattgtgtcctatgatgagcatgaagtcaacaacacattcaaattcggagtcatttatcaaaaagccaggcagaccctggaggaggagctatttgggaacaatgaggagagcccagcttttaaggagttcttggacctgctgggggacacgatcacactgcaggatttcaaaggtttccgaggaggcctggacgtgacccacggacagacaggggtggaatcagtgtacacaacattccgggacagggagatcatgtttcacgtttccacaaagctgccatttaccgacggagacgcccagcagctccagagaaagagacacattggaaatgacatcgtggccatcatcttccaagaggaaaacacgccgtttgtcccagacatgatagcctccaatttcttacatgcctacatcgtcgtgcaggtcgagaccccaggcacagagaccccatcctacaaggtaaggagaacgccttgttggagggagtggtgggcctcgacacctcaccctgtgtggatgctgtgatatcagaggacactagtcctcagcagtcagagattctccatgagtttgcaggtttctggggtttggagctagattctgggtagggaggaccttccaaggccacctgatcccccttgctgcctccgggctcaatggcatctcacttgaggattgaggaggtgtgagtgtagtatttggaatttggtgatgccatttgctcgctgtgagtgtagtatttggaatttggtgatgccatttgctcgctgtgagtgtagtatttggaatttggtaatgccatttgctcgctgtgagtgtagtatttggaatttggtgatgccatttgctcgctgtgagtgtagtatttggaatttggtgatgccatttgctcgctgtgagtgtagtatttggaatttggtgatgccatttgctcgagtaaggcagagctggaataaagaaagagcgtgga

SEQ ID NO: 52 - DNA, 604 bp, Homo sapiens
  misc_feature: Incyte ID No: 273259.4
gctcgaggttggatatcgcaggtgtcctgggaaacgaatgcaagtagatgatctcaacataagtggcatcatagcagccgtagtagttgtggccttagtgatttccgtttgtggccttggtgtatgctatgctcagaggaaaggctacttttcaaaagaaacctccttccagaatggggatacagcagtgaacaaaacaggccaaaaaccccacaaaactctgccttatggagcttacattctagtagagaaaggcagaaaataaacagatctggcagacctaactttggctctatgggcgtagagagaagatggatgacaaactatctgaggctattggcagctgggagttggagaagatatactgatagccatggcttcagacagtttgtcatctcctaattcctttgaagaatcatctgccattgacttcctgttcccagatttctggctcaatcctggaagagtaattcttcatctaaagccacgacaatgagtgaaaatgatttcaagcacacaaaatcctttataatttaaagactccactttagagatacaccaaagccaccgttgttacacaagttattaaactattataaaactc

SEQ ID NO: 53 - DNA, 844 bp, Homo sapiens
  misc_feature: Incyte ID No: 5170638CB1
  unsure 765, 767-768: a, t, c, g, or other
ggagaaacaccttgatcttggtttgcaagcccttctgcgctaatactgtgtaccaagctgatccctacaaaaatgcctgtgagccgccagcatggatgacatctacaaggctgcggtagagcagctgacagaagagcagaaaaatgagttcaaggcagccttcgacatcttcgtgctgggcgctgaggatggctgcatcagcaccaaggagctgggcaaggtgatgaggatgctgggccagaaccccacccctgaggagctgcaggagatgatcgatgaggtggacgaggacggcagcggcacggtggactttgatgagttcctggtcatgatggttcggtgcatgaaggacgacagcaaagggaaatctgaggaggagctgtctgacctcttccgcatgtttgacaaaaatgctgatggctacatcgacctggatgagctgaagataatgctgcaggctacaggcgagaccatcacggaggacgacatcgaggagctcatgaaggacggagacaagaacaacgacggccgcatcgactatgatgagttcctggagttcatgaagggtgtggagtagatgctgaccttcacccagagctgcctatgcccagcctccaactccagctgagtcctggggttggggagggggtcggggtcccaggacctgagcctggccatgtcctcaaccccaaatcccccgactccctccccagatctgtcctgggggatgcaaataaagcctgctctcccaaaaaaaaaaaaaanannaaagggaaaaagggaaaaaaaaaaaaaaaggggggggggaggaagaaaaatttaaaaaaaggaaaagggttctcct

SEQ ID NO: 54 - DNA, 599 bp, Homo sapiens
  misc_feature: Incyte ID No: 1330170.3
cgcgagcggccgctcggattctagaactagtcacagactcagagagaacccaccatggtgctgtctcctgccgacaagaccaacgtcaaggccgcctggggtaaggtcggcgcgcacgctggcgagtatggtgcggaggccctggagaggatgttcctgtccttccccaccaccaagacctacttcccgcacttcgacctgagccacggctctgcccaggttaagggccacggcaagaaggtggccgacgcgctgaccaacgccgtggcgcacgtggacgacatgcccaacgcgctgtccgccctgagcgacctgcacgcgcacaagcttcgggtggacccggtcaacttcaagctcctaagccactgcctgctggtgaccctggccgcccacctccccgccgagttcacccctgcggtgcacgcctccctggacaagttcctggcttctgtgagcaccgtgctgacctccaaataccgttaagctggagcctcggtagccgttcctcctgcccgctgggcctcccaacgggccctcctcccctccttgcaccggcccttcctggtctttgaataaagtctgagtgggcggcaaaaaaa

SEQ ID NO: 55 - DNA, 1145 bp, Homo sapiens
  misc_feature: Incyte ID No: 1383898.2
attacaagttaagaaaattgtttccaaatgcacttttcatgctgtgtatgctgaacacttcagaagtggagctcttaataagttgttacttttttctgtacttgaagcaggaagtggtttgagggagctgcgtggtctttcacatgtaattcagtgggtaaaggtgtcctgcccagaggcagagctcaccagctgattgtactctgactctcaaggtatttccaagtgagtgagtcgggggaagggagtaagggagtggactggagcttgggtcactatctgggctgctacaataggcatacaatggaaataggtggcttgactggggggaaaagattgacttaaatcccagctgtgcaatttgttcattgtttccaatggacaaaaggcagtttacccaggctcataatagcatacctgcctgggtgtccaaatgtaactagatgctttcacaaacccccacccacaaagcagcacatgtttttaagacttcagttttctattcacatcggcctcataatacccaccctgacctgctgtaaaagacctggaacaaacaaaaatgattacacctacagtgaagatgcacaccatgtcctcctcgcatctcttctacctggcgctgtgcctgctcaccttcaccagctctgccacggctggaccggagacgctctgcggggctgagctggtggatgctcttcagttcgtgtgtggagacaggggcttttatttcaacaagcccacagggtatggctccagcagtcggagggcgcctcagacaggcatcgtggatgagtgctgcttccggagctgtgatctaaggaggctggagatgtattgcgcacccctcaagcctgccaagtcagctcgctctgtccgtgcccagcgccacaccgacatgcccaagacccagaaggaagtacatttgaagaacgcaagtagagggagtgcaggaaacaagaactacaggatgtaggaagaccctcctgaggagtgaagagtgacatgccaccgcaggatcctttgctctgcacgagttacctgttaaactttggaacacctaccaaaaaataagtttgataacatttaaaagatgggcgtttcccccaatgaaatacacaagtaaacattccaaaaaaaaaaaa

SEQ ID NO: 56 - DNA, 1623 bp, Homo sapiens
  misc_feature: Incyte ID No: 019238.3
ggcgttcccactgcaccctggagaacgagcctttgcggggtttctcctggctgtcctccgaccccggcggtctcgaaagcgacacgctgcagtgggtggaggagccccaacgctcctgcaccgcgcggagatgcgcggtactccaggccaccggtggggtcgagcccgcaggctggaaggagatgcgatgccacctgcgcgccaacggctacctgtgcaagtaccagtttgaggtcttgtgtcctgcgccgcgccccggggccgcctctaacttgagctatcgcgcgcccttccagctgcacagcgccgctctggacttcagtccacctgggaccgaggtgagtgcgctctgccggggacagctcccgatctcagttacttgcatcgcggacgaaatcggcgctcgctgggacaaactctcgggcgatgtgttgtgtccctgccccgggaggtacctccgtgctggcaaatgcgcagagctccctaactgcctagacgacttgggaggctttgcctgcgaatgtgctacgggcttcgagctggggaaggacggccgctcttgtgtgaccagtggggaaggacagccgacccttggggggaccggggtgcccaccaggcgcccgccggccactgcaaccagccccgtgccgcagagaacatggccaatcagggtcgacgagaagctgggagagacaccacttgtccctgaacaagacaattcagtaacatctattcctgagattcctcgatggggatcacagagcacgatgtctacccttcaaatgtcccttcaagccgagtcaaaggccactatcaccccatcagggagcgtgatttccaagtttaattctacgacttcctctgccactcctcaggctttcgactcctcctctgccgtggtcttcatatttgtgagcacagcagtagtagtgttggtgatcttgaccatgacagtactggggcttgtcaagctctgctttcacgaaagcccctcttcccagccaaggaaggagtctatgggcccgccgggcctggagagtgatcctgagcccgctgctttgggctccagttctgcacattgcacaaacaatggggtgaaagtcggggactgtgatctgcgggacagagcagagggtgccttgctggcggagtcccctcttggctctagtgatgcatagggaaacaggggacatgggcactcctgtgaacagtttttcacttttgatgaaacggggaaccaagaggaacttacttgtgtaactgacaatttctgcagaaatcccccttcctctaaattccctttactccactgaggagctaaatcagaactgcacactccttccctgatgatagaggaagtggaagtgcctttaggatggtgatactgggggaccgggtagtgctggggagagatattttcttatgtttattcggagaatttggagaagtgattgaacttttcaagacattggaaacaaatagaacacaatataatttacattaaaaaataatttctaccaaaatggaaaggaaatgttctatgttgttcaggctaggagtatattggttcgaaatcccagggaaaaaaataaaaataaaaaattaaaggattgttgataaccc

SEQ ID NO: 57 - DNA, 530 bp, Homo sapiens
  misc_feature: Incyte ID No: 1102296.5
gtccccacagactcagagagaacccaccatggtgctgtctcctgccgacaagaccaacgtcaaggccgcctggggtaaggtcggcgcgcacgctgggcgagtatggtgcggaggccctggagaggatgttcctgtccttccccaccaccaagacctacttcccgcacttcgacctgagccacggctctgcccaggttaagggccacggcaagaaggtggccgacgcgctgaccaacgccgtggcgcacgtggacgacatgcccaacgcgctgtccgccctgagcgacctgcacgcgcacaagcttcgggtggacccggtcaacttcaagctcctaagccactgcctgctggtgaccctggccgcccacctccccgccgagttcacccctgcggtgcacgcctccctggacaagttcctggcttctgtgagcaccgtgctgacctccaaataccgttaagctggagcctcggtagccgttcctcctgcccgctgggcctcccaacgggccctcctcccctccttgcaccgg

SEQ ID NO: 58 - DNA, 922 bp, Homo sapiens
  misc_feature: Incyte ID No: 995673.3
ttcccatgccatcaaatctacaatctttgttctaaccaaagtttccaaatttatttcccttattcactaataaaaactctaccataggacatcttttcataggctatacactccaagctcgttatcacatcttcactttaatatttactctcatattgcccttcccttctccctgaatatccaaatcccatccagtctttaagaccaaagttccagaaagttctttaaaattatcccaatcttgtatgctttttgtttctctgagttcagtgtgtaaaggggacagttccagtgatttagattgatgtcctatctctctcactatgaaactgtgtggcctagagcatgtgctgtctcctgccgacaagaccaacgtcaaggccgcctggggtaaggtcggcgcgcacgctggcgagtatggtgcggaggccctggagaggatgttcctgtccttccccaccaccaagacctacttcccgcacttcgacctgagccacggctctgcccaggcggctctgcccaggttaagggccacggcaagaaggtggccgacgtggacgacatgcccaacgccgtggcgcacgtggacgacatgcccaacgcgctgtccgccctgagcgacctgcacgcgcacaagcttcgggtggacccggtcaacttcaagctcctaagccactgcctgctggtgaccctggccgcccacctccccgccgagttcacccctgcggtgcacgcctccctggacaagttcctggcttctgtgagcaccgtgctgacctccaaataccgttaagctggagcctcggtagccgttcctcctgcccgctgggcctcccaacgggccctcctccccttcctgcaccggcccttcctggtctttgaataaagtctgagtgggcggcaaaaaacacaaacaaaaaaa

SEQ ID NO: 59 - DNA, 1500 bp, Homo sapiens
  misc_feature: Incyte ID No: 312256CB1
caggtgcccgacatggcgagtgtagtgctgccgagcggatcccagtgtgcggcggcagcggcggcggcggcgcctcccgggctccggctccggcttctgctgttgctcttctccgccgcggcactgatccccacaggtgatgggcagaatctgtttacgaaagacgtgacagtgatcgagggagaggttgcgaccatcagttgccaagtcaataagagtgacgactctgtgattcagctactgaatcccaacaggcagaccatttatttcagggacttcaggcctttgaaggacagcaggtttcagttgctgaatttttctagcagtgaactcaaagtatcattgacaaacgtctcaatttctgatgaaggaagatacttttgccagctctataccgatcccccacaggaaagttacaccaccatcacagtcctggtcccaccacgtaatctgatgatcgatatccagaaagacactgcggtggaaggtgaggagattgaagtcaactgcactgctatggccagcaagccagccacgactatcaggtggttcaaagggaacacagagctaaaaggcaaatcggaggtggaagagtggtcagacatgtacactgtgaccagtcagctgatgctgaaggtgcacaaggaggacgatggggtcccagtgatctgccaggtggagcaccctgcggtcactggaaacctgcagacccagcggtatctagaagtacagtataagcctcaagtgcacattcagatgacttatcctctacaaggcttaacccgggaaggggacgcgcttgagttaacatgtgaagccatcgggaagccccagcctgtgatggtaacttgggtgagagtcgatgatgaaatgcctcaacacgccgtactgtctgggcccaacctgttcatcaataacctaaacaaaacagataatggtacataccgctgtgaagcttcaaacatagtggggaaagctcactcggattatatgctgtatgtatacgatccccccacaactatccctcctcccacaacaaccaccaccaccaccaccaccaccaccaccaccatccttaccatcatcacagattcccgagcaggtgaagaaggctcgatcagggcagtggatcatgccgtgatcggtggcgtcgtggcggtggtggtgttcgccatgctgtgcttgctcatcattctggggcgctattttgccagacataaaggtacatacttcactcatgaagccaaaggagccgatgacgcagcagacgcagacacagctataatcaatgcagaaggaggacagaacaactccgaagaaaagaaagagtacttcatctagatcagcctttttgtttcaatgaggtgtccaactggccctatttagatgataaagagacagtgatattggaacttgcgagaaattcgtgtgtttttttatgaatgggtggaaaggtgtgagactgggaaggcttgggatttgctgtgtaaaaaaaaaaaa

SEQ ID NO: 60 - DNA, 744 bp, Homo sapiens
  misc_feature: Incyte ID No: 199183.2
cagaaacatccagaatacatttccaacaagagcactggccaagtcagcttcttctgagagagtctctagaagacatgatgctacactcagctttgggtctctgcctcttactcgtcacagtttcttccaaccttgccattgcaataaaaaaggaaaagaggcctcctcagacactctcaagaggatggggagatgacatcacttgggtacaaacttatgaagaaggtctcttttatgctcaaaaaagtaagaagccattaatggttattcatcacctggaggattgtcaatactctcaagcactaaagaaagtatttgcccaaaatgaagaaatacaagaaatggctcagaataagttcatcatgctaaaccttatgcatgaaaccactgataagaatttatcacctgatgggcaatatgtgcctagaatcatgtttgtagacccttctttaacagttagagctgacatagctggaagatactctaacagattgtacacatatgagcctcgggatttacccctattgatagaaaacatgaagaaagcattaagacttattcagtcagagctataagagatgatagaaaaaagccttcacttcaaagaagtcaaatttcatgaagaaaacctctggcacattgacaaatactaaatgtgcaagtatatagattttgtaatattactatttagtttttttaatgtgtttgcaatagtcttattaaaataaatgttttttaaatctg

SEQ ID NO: 61 - DNA, 1284 bp, Homo sapiens
  misc_feature: Incyte ID No: 289671.40
  unsure 791: a, t, c, g, or other
aacaggttgtgatgtgcatccgcagggagcaccaaggttgagggacactgaaaagggaccaggctagaaaggaagaccgtggactcacattatgcctatgcccactgcacattcactggctcctgctgcccactgcagaataaatccagactcccaacaccctctcccctgttctgtcccttcctctcatttctgagccctgtgcccacctccttgggacccacctaagaacatttctcaacaggtatgtccgaccaggtggaggctttgtccctaatttccagctctttgagaaaggggatgtcaatggagagaaagagcagaaattctacactttcctaaagaactcctgtcctcccacctcggagctcctgggtacatctgaccgcctcttctgggaacccatgaaggttcacgacatccgctggaactttgagaagttcctggtggggccagatggtatacccatcatgcgctggcaccaccggaccacggtcagcaacgtcaagatggacatcctgtcctacatgaggcggcagcagcactgggggtcaagaggaagtaactgaaggccgtctcatcccatgtccaccatgtaggggagggactttgttcaggaagaaatccgtgtctccaaccacactatctacccatcatagacccctttcctatcactcaaggccccagcctggcacaaatggatgcatacagttctgtgtactgccaggcatgtgggtgtgggtgcatgtgggtgtttacacacatgcctacagggtatgccgtgattgtgngtgtgtgcatgggtgtacagccacatgtctacctatgtgtctttctgggaatgtgtaccatctgtgtgcctgcagctgtgtagtgctggacagtgacaaccctttctctccagttctccactccaatgataatagttcacttacacctaaacccaaaggaaaaaccagctctaggtccaattgttctgctctaactgatacctcaaccttggggccagcatctcccactgcctccaaatattagtaactatgactgacgtccccagaagtttctgggtctaccacactccccaaccccccactcctacttcctgaagggccctcccaaggctacatccccaccccacagttctccctgagagagatcaacctccctgagatcaaccaaggcagatgtgatagcaagggccacggaccccatggcaggggtggcgtcttcatgagggaggggcccaaagcccttgtgggcggacctcccctgagcctgtctgag

SEQ ID NO: 62 - DNA, 1030 bp, Homo sapiens
  misc_feature: Incyte ID No: 154403.1
gtttaagataaattcccccacactcccttgtacctactccttgccctctgccccagggttatagaacagctgctttctgctattctccccccaggctctgcagaaccttctgacctttcagaaggtttgcatcctttccctatagtttttccaccgctctgaccagtcccccacaatatatagccttgtatgcaaagccaggcctgtccatgcagggtgaccatccaaggtagacagtggcaaaatctggtggaggcatcagagatagtgccatcagtttgctggaacaagcatatcaaggagcctggcagatctacacttcaccagacggtgcctgtagccaacagggcaggcccttgctccagggaaacactcagaaatcaaaactccttgctctgctgccagggaactctccaggagatcctcagtgtcatcagaagctgaaaaaaacagtgctgagaaacgtggcctgccgtctttccagctaagggagatggcccattcgaccctgggttgtcctctgcaaacgcgctgctgcaggttgcatggcaccatctcctgattgcaatttgctttcctgagggagtgaactgactgaaattggatggtaataagttgctaggttattttccactttttagtttatgaggcttattcattttgctttaacattaaccactgccttccttttaaggagctggtgaggcagcgcatggcaacaggttcagggtgaggagtggcaccacctcctttcagtgaggatttgggaagggtgaaaagcaccctaatcttctcagccgcatgtgaacaaaccacctgtcaaggtgggtccttcctatagggaggttgatgtcagcccttcagggaggtctcagttttcttcctccacttcctaatcccttcattataattccttccacaacagaataagtttcttgagcaatgcagcaatatccagcaattttagatagacatttaccttttgacctagaaatctcacttctacgaatccatcctaaagacacacttt

SEQ ID NO: 63 - DNA, 1233 bp, Homo sapiens
  misc_feature: Incyte ID No: 086518.22
cgcggaggacctgtcggacgccctgtgcgagtttgacgcggtgctggccgacttcgcgtcgcccttccacgagcgccacttccactacgaggagcacctggagcgcatgaagcggcgcagcagcgccagcgtcagcgacagcagcggcttcagcgactcggagagtgcagattcactttataggaacagcttcagcttcagtgatgaaaaactgaattctccaacagactctaccccagctcttctctctgccactgtcactcctcagaaagctaaattaggagacacaaaagagctagaagccttcattgctgatcttgacaaaactttagcaagtatgtgaaacaagaagttctgggtcctttcatcataagggagaagcttcagaaagttccgaggacctgctaaaatcagctactagaatctgctgccagaggggacaaagacgtgcactcaaccttctaccaggccactctcaggctcaccttaaaatcagcccttgatcccatttctgggcaatttagacagtgaaactgactttgtttacctgcttgcagcatattagaacagacgatccatgctaatattgtattttctcttaaaacatagctttcctgtaatttaaagtgcttttatgagaaaatacaatattagcatggatcgtctgttctaatatgctgcaagcaggtatacaaagtcagtttcactgtctaaattgcccagaaatgggatcaagggctgattttaaggtgagcctgagagtggcctggtagaaggttgagtgcacgtctttgtcccctctggcagcagattctagtagctgattttagcaggtcctcggaactttctgaagcttctcccttatgatgaaaggacccagaacttcttgtttcacatacttgctaaagttttgtcaagatcagcaatgaaggcttctagctcttttgtgtctcctaatttagctttctgaggagtgacagtggcagagagaagagctggggtagagtctgttggagaattcagtttttcatcactgaagctgaagctgttcctataaagtgaatctgcactctccgagtcgctgaagccgctgctgtcgctgacactggcgctgctgcgccgcttcatgcgctccaggtgctcctcgtagtggaagtggcgctcgtggaagggcgacgcgaagtcggccagcaccgcgtcaaactcgcacagcgcgtccgacaggtcctccgc

SEQ ID NO: 64 - DNA, 718 bp, Homo sapiens
  misc_feature: Incyte ID No: 1383156.10
  unsure 152, 476, 478: a, t, c, g, or other
ggagagcataagcacctgcaagcaaagatggatgtgggcaagcaaagaggtcctgatggaagagcccgccgggactactccgcagctccccggggccgatttggcattccctgctgcccagtgcacctgaaacgccttcttatcgtggtggnggtggtggtcctcatcgtcgtggtgattgtgggagccctgctcatgggtctccacatgagccagaaacacacggagatggttctggagatgagcattggggcgccggaagcccagcaacgcctggccctgagtgagcacctggttaccactgccaccttctccatcggctccactggcctcgtggtgtatgactaccagcagctgctgatcgcctacgtctaagctgggccaggcagaggggcgagatgcaggctcagcaccctccggaggggacccggccttcctgggcatggccgtgagcaccctgtgtggcgaggtgccgntntactacatctaggacgcctccggtgagcagggtcagtggaagccccaacgggaaaggaaacgccccgggcaaagggtcttttgcagcttttgcagacgggcaagaagctgcttctgcccacaccgcagggacaagccctggagaaatgggagcttggggagaggatgggagtgggcagaggtggcgcccaggggcccgggaactcctgccacacagaataaagcagcctgattgaaaagc

SEQ ID NO: 65 - DNA, 356 bp, Homo sapiens
  misc_feature: Incyte ID No: 1100669.3
gcctgggccgtggctgtcactgcgttcggacccagacccgctgcaggcagcagcagcccccgcccgcgcagagcatggagtctggggggcctacctcctcctctgcctcttctccctcctgacccaggtcaccaccgagccaccaacccagaagcccaagaagattgtaaatgccctgctgaaggagcagcaggccctgcagacggtctgcctgaaggggaccaaggtgcacatgaaatgctttctggccttcacccagacgaagaccttccacgaggccagcgaggactgcatctcgcgcgggggcaccctgggcacccctcagactggctcggagaacgacggccctgtatgag

SEQ ID NO: 66 - DNA, 261 bp, Homo sapiens
  misc_feature: Incyte ID No: 1330148.1
ccacagactcagagagaacccaccatggtgctgtctcctgccgacaagaccaacgtcaaggccgcctggggatgttcctgtccttccccaccaccaagacctacttcccgcacttcgacctgagccacggctctgcccaggttaagggccacggcaagaaggtggccgacgcgctgaccaacgccgtggcgcacgtggacgacatgcccaacgcgctgtccgccctgagcgacctgcacgcgcacaagcttcgggtggacc

SEQ ID NO: 67 - DNA, 2900 bp, Homo sapiens
  misc_feature: Incyte ID No: 1436702CB1
gagcacccggcagcggtctcaggccaagccccctgccagcatggccagcgagttcaagaagaagctcttctggagggcagtggtggccgagttcctggccacgaccctctttgtcttcatcagcatcggttctgccctgggcttcaaatacccggtggggaacaaccagacggcggtccaggacaacgtgaaggtgtcgctggccttcgggctgagcatcgccacgctggcgcagagtgtgggccacatcagcggcgcccacctcaacccggctgtcacactggggctgctgctcagctgccagatcagcatcttccgtgccctcatgtacatcatcgcccagtgcgtgggggccatcgtcgccaccgccatcctctcaggcatcacctcctccctgactgggaactcgcttggccgcaatgacctggctgatggtgtgaactcgggccagggcctgggcatcgagatcatcgggaccctccagctggtgctatgcgtgctggctactaccgaccggaggcgccgtgaccttggtggctcagccccccttgccatcggcctctctgtagcccttggacacctcctggctattgactacactggctgtgggattaaccctgctcggtcctttggctccgcggtgatcacacacaacttcagcaaccactggattttctgggtggggccattcatcgggggagccctggctgtactcatctacgacttcatcctggccccacgcagcagtgacctcacagaccgcgtgaaggtgtggaccagcggccaggtggaggagtatgacctggatgccgacgacatcaactccagggtggagatgaagcccaaatagaaggggtctggcccgggcatccacgtagggggcaggggcaggggcgggcggagggaggggaggggtgaaatccatactgtagacactctgacaagctggccaaagtcacttccccaagatctgccagacctgcatggtcaagcctcttatgggggtgtttctatctctttctttctctttctgtttcctggcctcagagcttcctggggaccaagatttaccaattcacccactcccttgaagttgtggaggaggtgaaagaaagggacccacctgctagtcgcccctcagagcatgatgggaggtgtgccagaaagtcccccctcgccccaaagttgctcaccgactcacctgcgcaagtgcctgggattctaccgtaattgctttgtgcctttgggcacggccctccttcttttcctaacatgcaccttgctcccaatggtgcttggagggggaagagatcccaggaggtgcagtggagggggcaagctttgctccttcagttctgcttgctcccaagcccctgacccgctcggacttactgcctgaccttggaatcgtccctatatcagggcctcagtgacctccttctgcaaagtggcagggaccggcagagctctacaggcctgcagcccctaagtgcaaacacagcatgggtccagaagacgtggtctagaccagggctgctctttccacttgccctgtgttctttccccaggggcatgactgtcgccacacgcctctgtgtacatgtgtgcagagcagacaggctacaaagcagagatcgacagacagccaggtagttggaactttctgttccctatggagaggcttccctacacagggcctgctattgcagaatgaagccatttagagggtgaaggagaaatacccatgttacttctctgagttttagttggtctttccatctatcactgcattatcttgctcattcttcagttctctactccctcttgtcagtgtagacacaggtcaccattatgctggtgtatgtttatcaaagagcacttgagctgtctgaagcccaaagcctgaggacagaaagaccctgatgcaggtcagcccatggaggcagatgcccttgctgggcctgggggttttccaagccctcagctggtcctgaccaggatggagcaagctcttcccttgctcatgagctcctgatcagaggcatttgagcagctgaataacctgcacaggcttgctgtatgacccctggccacagccttccctctgcattgacctggaggggagaggtcagccttgacctaatgaggtagctatagttgcagcccaaggacagttcagagatcaggatcagctttgaaggctggattctatctacataagtcctttcaattccaccagggccagagcagctccaccactgtgcacttagccatgatggcaacagaaaccaagagacacaattacgcaggtatttagaagcagagggacaaccagaaggcccttaactatcaccagtgcatcacatctgcacactctcttctccattccctagcaggaacttctagctcatttaacagataaagaaactgaggcccacggtttcagctagacaatgatttggccaggcctagtaaccaaggccctgtctctggctactccctggaccacgaggctgattcctctcatttccagcttctcagtttctgcctgggcaatggccaggggccaggagtggggagagttgtgatggaggggagaggggtcacacccaccccctgcctggttctaggctgctgcacaccaaggccctgcatctgtctgctctgcatatatgtctctttggagttggaatttcattatatgttaagaaaataaaggaaaatgacttgtaaggtcaaaaaaaaagagagagaaccgaagcaagagacggaggacgacgcggagctctccagtcacggcgagcacgcaaagaaaagaagaggcccgcgcgcggctctttgaccccttcgcccgggtattatttccggccggtccctgaggtgtccagcttctcttagtg

SEQ ID NO: 68 - DNA, 1224 bp, Homo sapiens
  misc_feature: Incyte ID No: 3141226CB1
  unsure 36, 91, 645, 655, 660, 671-672: a, t, c, g, or other
tcgggatcgatctggagctccgggaatttccctggnccgggactccgggctttccagccccaaccatgcataaaaggggttcgccgttctnggagagccacagagcccgggccacaggcagctccttgccagctcttcctctcctctcacagccgccagacccgcctgctgagcccccatggcccgcgctgctctctccgccgcccccagcaatccccggctcctgcgagtggcgctgctgctcctgctcctggtagccgctggccggcgcgcagcaggagcgcccctggccactgaactgcgctgccagtgcttgcagaccctgcagggaattcacctcaagaacatccaaagtgtgaaggtgaagtcccccggaccccactgcgcccaaaccgaagtcatagccacactcaagaatgggcagaaagcttgtctcaaccccgcatcgcccatggttaagaaaatcatcgaaaagatgctgaaaaatggcaaatccaactgaccagaaggaaggaggaagcttattggtggctgttcctgaaggaggccctgcccttacaggaacagaagaggaaagagagacacagctgcagaggccacctgggattgcgcctaatgtgtttgagcatcacttaggagaaggcnccgattaatnaattnattaatttatnnattggttggttttagaagattctatgttaatattttatgtgtaaaataaggttatgattgaatctacttgcacactctcccattatatttattgtttattttaggtcaaacccaagttagttcaatcctgattcatatttaatttgaagatagaaggtttgcagatattctctagtcatttgttaatatttcttcgtgatgacatatcacatgtcagccactgtgatagaggctgaggaatccaagaaaatggccagtaagatcaatgtgacggcagggaaatgtatgtgtgtctattttgtaactgtaaagatgaatgtcagttgttatttattgaaatgatttcacagtgtgtggtcaacatttctcatgttgaagctttaagaactaaaatgttctaaatatcccttggacattttatgtctttcttgtaaggcatactgccttgtttaatgttaattatgcagtgtttccctctgtgttagagcagagaggtttcgatatttattgatgttttcacaaagaacaggaaaataaaatatttaaaaatat

SEQ ID NO: 69 - DNA, 1222 bp, Homo sapiens
  misc_feature: Incyte ID No: 289671.44
cttgcaggacggagtcttggccgcacactgagcctatacctcacccgtctcccaccaactcttggtactggatgcagccatgctgggcagctctatggaggcctggcgggctagcttgggggtctggccagcagtcctttcacagctggggagtggagtctgggcctgaggtctcctgtgcgcctcttctgggaacccatgaaggttcacgacatccgctggaactttgagaagttcctggtggggccagatggtatacccatcatacgctggcaccaccggaccacggtcagcaacgtcaagatggacatcctgtcctacatgaggcggcaggcagccctgggggtcaagaggaagtaactgaaggccgtctcatcccatgtccaccatgtaggggagggactttgttcaggaagaaatccgtgtctccaaccacactatctacccatcacagacccctttcctatcactcaaggccccagcctggcacaaatggatgcatacagttctgtgtactgccaggcatgtgggtgtgggtgcatgtgggtgtttacacacatgcctacaggtatgcgtgattgtgtgtgtgtgcatgggtgtacagccacgtgtctacctatgtgtctttctgggaatgtgtaccatctgtgtgcctgcagctgtgtagtgctggacagtgacaaccctttctctccagttctccactccaatgataatagttcacttacacctaaacccaaaggaaaaaccagctctaggtccaattgttctgctctaactgatacctcaaccttggggccagcatctcccactgcctccaaatattagtaactatgactgacgtccccagaagtttctgggtctaccacactccccaaccccccactcctacttcctgaagggccctcccaaggctacatccccaccccacagttctccctgagagagatcaacctccctgagatcaaccaaggcagatgtgacagcaagggccacggaccccatggcaggggtggcgtcttcatgagggaggggcccaaagcccttgtgggcggacctcccctgagcctgtctgaggggccagcccttagtgcattcaggctaaggcccctgggcagggatgccacccctgctccttcggaggacgtgccctcacccctcactggtccactggcttgagactcaccccgtctgcccagtaaaagcctttctgcagcagctg

SEQ ID NO: 70 - DNA, 682 bp, Homo sapiens
  misc_feature: Incyte ID No: 197927.7
ggcagagagcgccctgggaaatgcggatatagaaggtcaggagaacatctctcctggttatacagcattccaggtgggctttcatgtggttgaggataatatcattagcaccaaaggtgaaaatccgtggaagctcatcttatttcagcagaagagtaggatgggccttgtggcacgagtaagccaaacaagggaaaggcattcaccatcaattgactcctcatctgtttttaagagggaaatctgagttttcaaggaaagccgaatacagttgccaagttgccagtcaaagaaacaatgtcaacacctgctcatagagatggaattcctaacccggaatattgcccttgaattacaacgagaaaaagcacctcttcaagtgagatggcagaccacctcaggatggaaatgtatttcttcatccccctctctacttccctgtgacctcctgcaaataagggagagacaaagagaagagcagaagaacagaagaatggagtggcaaagagaagagaaggagtgactgaacattgacaagactttggttggggatggtcagagaggagattagctgctagacggccacactgcggagaaagatcattttcccactccatcccccttccagctccccatccatctcaccaagagccagctccaccactcaataaagccttacata

SEQ ID NO: 71 - DNA, 389 bp, Homo sapiens
  misc_feature: Incyte ID No: 1134834.2
  unsure 288, 345, 351, 359, 368-369: a, t, c, g, or other
ctccttctacacccgcaaggagtcctatgactatcaggcagcctgtgcccctcagccccctggcaacctgggtgctgcaccccggggtgtctttgtgcccactgctggtgccagggtgggtgtccatgtgcacccggcctggatgccagctgtgtccttcgggggcgtgcgtgtaactgtagtgtagtcaggtgctcaatggagaatataaacatatacagaaaaatatatattttaagtttaaaaaacagaaaaacagacaaaacaatccccatcaggtagctgtcnaacccccagctgggtctaatccttctcattacccacccgacctggctgcccctcacntgggcngggggacngggggggcnnttcttttctctggccttttt

SEQ ID NO: 72 - DNA, 1275 bp, Homo sapiens
  misc_feature: Incyte ID No: 200273.1
  unsure 1212: a, t, c, g, or other
atttgaaaaagagatatccacatcttcaagcccatataaaggatagaagctgcacaggggcagctttacttactccagcaccttcctctcccaggcaaaatgaaaatacttgtggcatttctggtggtgctgaccatctttgggatacaatctcatggatacgaggtttttaacatcatcagcccaagcaacaatggtggcaatgttcaggagacagtgacaattgataatgaaaaaaataccgccatcattaacatccatgcaggatcatgctcttctaccacaatttttgactataaacatggctacattgcatccagggtgctctcccgaagagcctgctttatcctgaagatggaccatcagaacatccctcctctgaacaatctccaatggtacatctatgagaaacaggctctggacaacatgttctccagcaaatacacctgggtcaagtacaaccctctggagtctctgatcaaagacgtggattggttcctgcttgggtcacccattgagaaactctgcaaacatatccctttgtataagggggaagtggttgaaaacacacataatgtcggtgctggaggctgtgcaaaggctgggctcctgggcatcttgggaatttcaatctgtgcagacattcatgtttaggatgattagccctcttgttttatcttttcaaagaaatacatccttggtttacactcaaaagtcaaattaaattctttcccaatgccccaactaattttgagattcagtcagaaaatataaatgctgtatttatagattttttggtgtttgttgttttttgtaagcagcaaagggaatccaagcaatgtctttgtcactatatagaagaaaaaaaattgccagaattttaaataaggtgcataatgtgtgaaaattcccagataataccactgggtcacatgtggactagtcagctggggtcgaatttccatttcttcgtctgccctctggaccagcttcccatctaaccatccaaatatatgggagcaacctgggtagagaagaggctcacacggtggtggccttgacctggccaggggagggacatagcgtatgcttatcaaacaagttgaatgctcaggtgaaggcttttagggccattcatatgagttaaaatgtcctttaactcaccaaagcagtagactcaacctgaataaactttataataatatgtgttgncctggagtgagaagggagaaagggagagaggaaggagcacctaacatccaggaaaagatgcac

SEQ ID NO: 73 - DNA, 231 bp, Homo sapiens
  misc_feature: Incyte ID No: 477974.1
gtgcccagccgggaccaaccttttaacagaagttaccattaaatgtctttaaaaatctatgttttctaattctgtaattaaaaagactttttttcttgtcacatgggtaatgtgccaacgttgtgacaaggtttgagagtggcatgtctcacacatggatgtgaacacccaagcacactcatgaattacaaaaggatccaaaaatagacatttttaatttaaaacaattat

SEQ ID NO: 74 - DNA, 2841 bp, Homo sapiens
  misc_feature: Incyte ID No: 235095.7
ctgcacgcttggtgctacctctcgccgcctcatgcattcaggggacctgtgcctgtcattcaggcacaaggtgacggggctgcactctggcacactccaggtgtttgtgagaaaacacggtgcccacggagcagccctgtggggaagaaatggtggccatggctggaggcaaacacagatcaccttgcgaggggctgacatcaagagcgtcgtcttcaaaggtgaaaaaaggcgtggtcacactggggagattggattagatgatgtgagcttgaaaaaaggccactgctctgaagaacgctaacaactccagaactaacaatgaactcctatgttgctctatcctctttttccaattctcatcttctctcctcttctcccttttatcaggcctaggagaagagtgggtcagtgggtcagaaggaagtctatttggtgacccaggtttttctggcctgcttttgtgcaatcccaatgaacagtgataccctccttgaaatacaggggcatcgcagacacatcaaagccatctgtgggtgttgccttccatcctgtgtctctttcaggaaggcattcagcatgcgtgagccataccatcctccatcctgattacaaggtgctccttgtagcaaattatgagagtgagttacgggagcagtttttaaaagaaatctttgcagatggctatgatgttatgtgttcggtgttgtaccatgagtagtattgacttcccttgagatatgatgtacaatgtgcttgtgaaattgacttaccctcttcacttaagttagttctggcctgacctgaactctgacttttactgccattcactttataaaataagggtgtgtaacatatcaagatacatttatttttatctgttttttttttcctgttaaagacaattatgtagagtgggcacgtaatccctccttagtagtattgtgttttgtgtaaatgtgctattgatattaagtatttacatgttccaaatatttacagactctagttgcaaggtaaagggcagcttgtgatctcaaaaaaatacatggtgaaatgtcatccagttccatgaccttatattggcagcagtaggaaattggcagaagtgttgggttgtggtaacggagtgatgaatttttttttaatggccttgagtttgatctctgcaaaggataggaaacctttaggaagacaagaaactgcagttaatttagaactgtcactgtttcaagttacactttaaaaccacagcttttaccatcataacatggctctggtaatatgtaggaagctttataaaagttttggttgattcagaaaaaggatcctgttgcagagtgagaggaagcatagggggaaactccattggaacagattttcacacaacgttttaaattgatataagtttaggcagttgtagttcataacttatgttgctcatgttgtgctgtgtcaggatgggataggaagcaagtcccatgcttagaggcatgggatgtgttggaacgggatttacacacactggaggagcagggcaagttggaattctaagatccatgaacccccaactgtatttcctccctgcatattttaccaatatattaaaaaacaatgtaacttttaaaaggcatcattcctgaggtttgtcttaatttctgattaagtaatcagaatattttctgctgtttttgccaggaatcacaaagatgattaaagggttggaaaaaaagatctatgatggaaaattaaaggaactgggattattgagcctggagaagagaagactgaggggcaaaccattgatggttttcaagtatatgaagggttggcacagagagggtggcgaccagctgttctccatatgcactaagaatagaacaagaggaaactggcttagactagagtataagggagcatttcttggcaggggccattgttagaatacttcataaaaaaagaagtgtgaaaatctcagtatctctctctctttctaaaaaattagataaaaatttgtctatttaagatggttaaagatgttcttacccaaggaaaagtaacaaattatagaatttcccaaaagatgttttgatcctactagtagtatgcagtgaaaatctttagaactaaataatttggacaaggcttaatttaggcatttccctcttgacctcctaatggagagggattgaaaggggaagagcccaccaaatgctgagctcactgaaatatctctcccttatggcaatcctagcagtattaaagaaaaaaggaaactatttattccaaatgagagtatgatggacagatattttagtatctcagtaatgtcctagtgtggcggtggttttcaatgtttcttcatggtaaaggtataagcctttcatttgttcaatggatgatgtttcagatttttttttttttaagagatccttcaaggaacacagttcagagagattttcatcgggtgcattctctctgcttcgtgtgtgacaagttatcttggctgctgagaaagcagtgccctgccccacaccggcagacctttccttcacctcatcagtatgattcagtttctcttaatttctgattaagtaactcagaatatttcctgctattttggccaggaatcacaaagatgattaaagggttgaaaaaaaaaagatctatgagtggaaaattaaaggaactgggattattgagcctggagaagagaagactgaggggcaaaccattgactggtttccaagtattttgaagggttggcacagagagggtggcgaccagctgttctccatatgccctaagaatagaacaagaggaaactggcttagactagag

SEQ ID NO: 75 - DNA, 1277 bp, Homo sapiens
  misc_feature: Incyte ID No: 407593.1
  unsure 572: a, t, c, g, or other
tatataaaatagatataaaaataaagatattttaaagattatttataaatatatgttttttaaaaatgtagtctattataagccaaatgtcattaggcatgtagtccatttctttctgtgttcaggcaggagttccagttctataaacattggtttatctgtttttctagcaggtgcacacatgggttctcagtgatgtgtagccggggcatagattgctctcagtctgttgcaccctgcaggggagatgtctgaggtcctccctcgcctggctgtgctggacgcacagtgcacagcagaactaactgcacagcagaaatgcctgttctgcgttcccattgatacaccaacagctaatgaagtctcttttacttttaagaaacccttatttggctttggcatatttacatggtagaggcctagaattttataaataaaattttgaagaatagaaatgtattttttcacgatttaaaaaccacctgtatggtttactctggagttgacctgttccactcatccttctccccagttcatttgtttcgtttcaattccactttccctatagctancttcaaagcagtgtctatgggacagcattggcaagagccctgactgggcctggcttggtaactcactcctgtaatcccacctgcccctagaagtgcagatatactagaaaatacagctgtctttgttccagtgaatatgtataaggggtgacatgccttggtggaaagcagctcagattgtgtggactcctcaatccctgctctaccaagagctctccagttccaaaactgtacactcagtggctatgttctgtgtgcctgctcccaatacagccattatgttgttcatccagatttgagaatttaagcttttcactcctctttgggtagtattatttaagtaagaacttctaggaaaatagtatgagtttggttatttttccctcggcagcaggaattttctgaatatttagcacattcagattgctccaagaacagcattgagcaatgctgtacatgtgctttctcctaaggctgtctcccctgtctcctgggttctggaaagactcattgtccttcagggaagggagcatttttcctcactgccattgctgagccttttctcctgttgtatactatttagcccagcatgaagccatcgccgactgtaaggagtgatggatagaagtgtttacttggtttgtgaggccttgtctctaaagggtaacagtctgacaaggaaaacatttcaaagagccctgacca

SEQ ID NO: 76 - DNA, 1273 bp, Homo sapiens
  misc_feature: Incyte ID No: 332301.1
  unsure 289, 1023, 1034-1035, 1040-1041, 1043, 1065, 1072, 1076, 1081: a, t, c, g, or other
ggcaaaatttgaatgattagagagggagattgaaatttttatatagtaagactagggagggcctcactgagaaggtactatttgacagaagagggacccatgttatatccgaggaaagagcattccagacaagggcagaggctggaagtgagtgtgcctggcatgtgtgaggaacaacgaggaggccaatgtagttcagtcaggaaaagattaatgataggagtgcagtgcaggtgtgaacttcatgagggacccggtagataataaaggacttaggcattggtttganagagatgtgaaatcatttgagggttttgagaagagacacgtgatctcacttctgttttaacagtgccactctggctactgtgttgcaaattgactgcaggaaactagggcagaaataagaaaatcagtttggaggtattggcccagagtgtgggcaatggttttggagtaaggtggttgaattctggatatatttgtgagtggagtcaacaagattcgctgtcaaactgcttgttggcacataagaaaaatggaggaattaaggttggctcccaaaatttggagcctcagcaactgcacatatgtacttttcactaacagaggataggaaggagcaagattgagacatctaagaggaaatgtgaagtagggatgggaattagttttgctgatctggatttcagaagaaatgtctgggcttgagataaaaatgcattcaaaaaaatgcatgtaagtaaaatccaaagccatgtgcctgggtatgctcacctgaggcgtagggaattctgagacctcttatagagaaaggaactgagccctggggtgctccaacatctaggcatcaagagggatcaggagaagtctgtacaagaggaacagccaaaaaggtaggaggaagaccagtatcggtggtagtggaagccaagggaagatggtgtttccaggagggactaatcagctacgttagggtgcggctgagagattaagtcagatgagaaatgactgtaggcattngcaatgtggtnntggtnntngttgttcatgtcgttgaaagtnatgaatngtgnttcantgcagttgtggtaacagtatgatcatgggatggattcagagagaatgggagacagcaagtataggctactatgctaaggagctctgctccagaaatcctccccgtatcctatatcaaaattttttccttgctgctgcactttaccatcagtatacaaacatgtttcctcttccatttaaaaaaaataaagaa

SEQ ID NO: 77 - DNA, 2088 bp, Homo sapiens
  misc_feature: Incyte ID No: 407699.4
agtgagacctcacctctaaaaaagttttttataaatttacttgtctaaagtggggaaagggaaattattctgttttcttattcttgcttcaagactatgacagatttgaaagagaattctaaagcagatttagagaacctgcttctcttcttatctcctaatccctaaattgtaatttagctcttatctgtattgttgttttgttttggtaaagggatgatttttacattgagttttaaagtagaataagaaaagcttctaaaaacttgcattgtgctagggatctgccctatatctttgcctctggtgtttcgttgttgttgttatcgtttgtttgtttccaaagaagttggagttaaggacacaatatatttgtacccctagactgaatgggtgagtattccatatgaggatctgggtaatcctctttgcaacccacatttggtcttcagagacactggcattttgaagaaacatatgatatagctgtttggaaataaattcatctatgttactttttttttctttttttttttttttatgagcaggagatcttaattgacagaaactcattggtggttggagtggccaatgggcacgggaaaaagtatccagtaatcagaagaattgtatctgggttatgtaatcttatgcacattccattgtctttgccaagcccagaagccatgttgtgttcattgttaagaaatttgatagatttacccagcttttctatgtattttgacttattgaaaatatgtaacaactgagtcgggttgcagcactggtggggtagaatcgactttccctgaaggtgacacagatgtcagaattgtgtccagggatttaatttagacccatactgtccaggagactgtctctagttggatctctgtgctgactgactgacagacagactttagtgtctgtgtgctgactgacagactctagtagtgtctatatgttgaccaactggtagaccaggaggatctgtgtgctgattgactctagtaggatctgtttgtcactgacagactgtagtagtgtctgtgtgctgactgatagatagactatagtaaaatttgggtgttgcctgactaacggtctagggtctgtaagctgacagtctgcctgctttctgattgtatccattgaagtgtatgtacattatggtaattctctgtctattaaatgtgtctaacaaaggaaggaattaagcactccacgtgttttctttataggggagttctgtacactatgattttaaatagatatttcttatatagtagtggccaaattctcattattttgtacaagataaaggttatgcatcacttttatggtattttgtgaactcagctaagggaatgcctgttcagagcctggagttgttacctttacttgaagtcatctcatccagtcccctgctttagggcaggacttcagttccactgttcatttctgaagcttctgtgtccccagcttaccctgttctgaaatgttgtattccattggacagggctgctatttttagtcagccatgcatttggattttacacttaatctagtaagtaaaaatgagaagaaaatttggcatttaaaaattgattttaagggttggcaaaagtattttttccagtaagcctttcactggatatctgtgaccaatgtttacctacgcaatgtttttgtatctgaattgcttatgtacgttttttattatattgacctaacaagaagatcaacttatgctggtatggtgatggttttgctatggcaaaatcaaagggctgatcatacatggtgccctttgggaagggggatggtgtggggctgagcacctctgggttgaatgggaatgggtcagattgggaagcctaggaagagagttctactgtagatttcctaggcactgctctgttgaaataggaacataagtctttagcaacattctgatttaatcgggtgacactgataacaaagtatgccactcagatccatttaaagtgtgcataactgtatttgaaatgtgtttttgtgtgcgtgtgtgtagaatgggtaaataaaattgttgagtaacttgaacct

SEQ ID NO: 78 - DNA, 971 bp, Homo sapiens
  misc_feature: Incyte ID No: 405501.1
cttcagactcaagactgcaacaccgtgcctgccctctagctatgctttaaggcaggcctatcagcccagactggagtcatgtaatacatggctctgtcagtagctctccttcccacaaataagttttgatgatcttacactcatccctgccgttagcattcaggaccaatcttctatagcctatacgccacactggtctaggacagcacctaaataatactcatgctataaaaaattcatcaagttatatatttttaaaaacatccctaaaattatctttttcctttactgaaaagaatttcaggatcccctctctctcactgcctctcttcacacacacctaccttagttggtcacctattttgtaaacatatcttctttaaaaaaagaaagaaatggcagtacatgaaaaactgcttcgtaaacagaaactatattatttatatttgtagcatttttttccccttgaggttaatttcctttgcttcccataactggaagccaatgattcagtgccattatataagcttattttccctcttggaaatagtaaattataagaggtttgacccaaaaatatacatcaaaattaggcagtattcggtgtttagcctccatctgccttgtcttcttgtctttagttgtgcaagtagatgctgatgatttctggcagagctaaagtaagtaaatcatgtgaatttattttttttcctcataaaacagatggcatggtctagctctgggcttgtatgtttcatgaagtacatgggtctgagtgcgtatttattttgtgagccaaggtttatgccttcttctataattttctttcaccgaaaattacctggagagctagaaactccatttgtgtcagcgtaagaagctttagaatctatatccagaccaaggccatggaacaatgtagattcactcagtaaaactcactagcggccttcttgtactagtctgtcact

SEQ ID NO: 79 - DNA, 1313 bp, Homo sapiens
  misc_feature: Incyte ID No: 482541.2
  unsure 1287: a, t, c, g, or other
tacatttactaaaatgatgtaataaataacatgttaatagactcaagctttaccttatgaaattgatgtatttttaccagttatttctaatgtaacattgaatatataagatctgacaaatgtatgtttaaacatgaattagaagagttgagaactaccattatgtatagggattctcatagtgtcttggcccttaattggaaagttgtggcaactttaaagtactttttactgtatgttataattctttataacttagagagagacaatggtcactcaaactatgagaactatgaattaggagataaaagtttaaatttgttgttgttttataacagtatgtacaagttagttttcccttatatatttacgttttcaagttttttaatctcatcatatacatccatactctataaaatgttttatattcaaagaactgtaaaatcctaaacattagttttcactattgaaattgttttttaaagataggcataaatagttgtccttagacttattcatacaaatatagtcatttacttctatgtagtttgagattctgagagttattccaactttatgaagattgatttcaatgtgcctgctaagtcctaaaagattcagaaagaaaatttatatattattgatttaaatatcatcctttaaatatgttgtataacattcaatatagtttatgtatcagtgattgtattttattctgaatgcatgatctcaagccttaactactataatctttttctgcccctcagaaattgaataacctaaccaagatgcctttaggggatgccctaagtaaatgtaatttcagatttcagggttttttttttttcctctctaagtgttccttccctttcttctcctgctctccatcatgttatggagaccagtgaggaaccagtgttaacttggtgacaatgtgacagctggtgctttatctaagctccgttttctatttcttgggaatgctttattgtggaaactgcttcagatacttaaattgaatcataacttgcttctgtaaattgcgtaaagacaacaaactgattttagtttgaaaagtttatcttttacttgtaaaccttgtttgccagttaccttccgaaagctgtgtaaagagttatttttaacaaagtcttaacaatatatgttactttttagatactatagaaaataataaatataacctgtaaaccacattaagctatgtttgtttttaatttgataaatcacattggcaactttgtgtagtatactttttaaaaataagcnttacattaaagtttgttaattcaggc

SEQ ID NO: 80 - DNA, 1611 bp, Homo sapiens
  misc_feature: Incyte ID No: 237026.3
ccgtgcatccccctggcagccacccttcccagagtcctttgcccaggccaccccaggcttcttggcagccctgccgggccacttgtcttcatgtctgccagggggaggtgggaaggaggtgggaggagggcgtgcagaggcagtctgggcttggccagagctcagggtgctgagcgtgtgaccagcagtgagcagaggccggccatgggccagcctggggctgctgctcctgctcttactgacagcactgccaccgctgtggtcctcctcactgcctgggctggacactgctgaaagtaaagccaccattgcagacctgatcctgtctgcgctggagagagccaccgtcttcctagaacagaggctgcctgaaatcaacctggatggcatggtgggggtccgagtgctggaagagcagctaaaaagtgtccgggagaagtgggcccaggagcccctggctgcagccgctgagcctgcgcgtggggatgctgggggagaagctggaggctgccatccagagatccctccactacctcaagctgagtgatcccaagtacctaagagagttccagctgaccctccagcccgggttttggaagctcccacatgcctggatccacactgatgcctccttggtgtaccccacgttcgggccccaggactcattctcagaggagagaagtgacgtgtgcctggtgcagctgctgggaaccgggacggacagcagcgagccctgcggcctctcagacctctgcaggagcctcatgaccaagcccggctgctcaggctactgcctgtcccaccaactgctcttcttcctctgggccagaatgagggggtgcacacagggaccactccaacagagccaggactatatcaacctcttctgcgccaacatgatggacttgaaccgcagagctgaggccatcggatacgcctaccctacccgggacatcttcatggaaaacatcatgttctgtggaatgggcggcttctccgacttctacaagctccggtggctggaggccattctcagctggcagaaacagcaggaaggatgcttcggggagcctgatgctgaagatgaagaattatctaaagctattcaatatcagcagcatttttcgaggagagtgaagaggcgagaaaaacaatttccagatggctgctcctcccacaacacagccacagcagtggcagccctgggtggcttcctatacatcctggcagaataccccccagcaaacagagagccacacccatccacaccgccaccaccaagcagccgctgagacggacggttccatgccagctgcctggaggaggaacagacccctttagtcctcatcccttagatcctggagggcacggatcacatcctgggaagaaggcatctggaggataagcaaagccaccccgacacccaatcttggaagccctgagtaggcagggccagggtaggtgggggccgggagggacccaggtgtgaacggatgaataaagttcaactgcaactgacccagggttgagtcttgtttctcagctttgaggacaaccttggacaacctcttggtctgtttcaactctccaatcccactcaacacaaattct

SEQ ID NO: 81 - DNA, 981 bp, Homo sapiens
  misc_feature: Incyte ID No: 443605.4
tgagagccgggttttctgacttccaactcattagggaccaggttctttttcttcaggatcaggcacagagactgactgaatggctccaattatcaggatttgaaaacccagtatcagaatctaccactttgtgcctgagggagagggaaaagcggatacccacctgtgtcgctgtttgcgtgccaagtccaggaacagtccatacagccctgctgcatcccacgacgctgtcacaaagcaggagttcatccgaggccaagatggagaaactgaggcccagaaattgatgtccagaatgctttgctcttagccactgtactattatggcatattttatctttatgtattgcatcatttcatggattcaagtttatcaatgtcctttgacaagtttaaaaatctgtctgctaaaatctatcaaatacattaaggaaaagtcccacttggcacatctcccacaccagatgttaattattcatactgcatgactgaggattttggaggcagagagagattcatctgcaatatttggaacaccaatggaggtctacgtcaacacagaatttatacagcagctggtgctagtcagagctaatgacagaatttcagtttaataaaaagacccccaactgagcacaccatcttgaaaaaagtatacttatcaaacagctttcaatcagttcaagagagacaccttaattggggagaggaagaattgcagagtagtttgtaatcatgccaattccagatcaataactgcatgtctgttctttggtagaaatagcttttgctttatattaagtaatcacatatatattctctctatttggataaggaaaccttcgctttatttgacaatgtataatgatatactcttctaattcacctctgtgtcttcacaataaacatgagtaaaatttagacaagtgatggtaaaggtcaatataattatttatttttaaaataaattttgtattaaca

SEQ ID NO: 82 - DNA, 802 bp, Homo sapiens
  misc_feature: Incyte ID No: 443605.15
gccgggttttctgacttccaactcattagggaccaggttctttttcttcaggatcaggcacagagactgactgaatggctccaattatcaggatttgaaaacccagtatcagaatctaccactttgtatgttaattattcatactgcatgactgaggattttggaggcagagagagattcatctgcaatatttggaacaccaatggaggtctacgtcaacacagaatttatacagcagctggtgctagtcagagctaatgacagaatttcagtttaataaaaagacccccaactgagcacaccatcttgaaaaaagtatacttatcaaacagctttcaatcagttcaagagagacaccttaattggggagaggaagaattgcagagtagtttgtaatcatgccaattccagatcaataactgcatgtctgttctttggtagaaatagcttttgctttatattaagtaatcacatatatattctctctatttggataaggaaaccttcgctttatttgacaatgtataatgatatactcttctaattcacctctgtgtcttcacaataaacatgagtaaaatttagacaagtgatggtaaaggtcaatataattatttatttttaaaataaattttgtatctaacaggaaagcagttcttatgaaatttttatattttcaaaaattgttttgttcaaataaaattttatgagtaaagttaaatgatggtggtttaattataagaagagtatactgaacactgataatctgatttgtatgcaattacttcggggaaggctgtac

SEQ ID NO: 83 - DNA, 539 bp, Homo sapiens
  misc_feature: Incyte ID No: 029997.1
gctcgagggcaagtggaaccactggcttggtggattttgctagatttttctgatttttaaactcctgaaaaatatcccagataactgtcatgaagctggtaactatcttcctgctggtgaccatcagcctttgtagttactctgctactgccttcctcatcaacaaagtgccccttcctgttgacaagttggcacctttacctctggacaacattcttccctttatggatccattaaagcttcttctgaaaactctgggcatttctgttgagcaccttgtggaggggctaaggaagtgtgtaaatgagctgggaccagaggcttctgaagctgtgaagaaactgctggaggcgctatcacacttggtgtgacatcaagataaagagcggaggtggatggggatggaagatgatgctcctatcctccctgcctgaaacctgttctaccaattatagatcaaatgccctaaaatgtagtgacccgtgaaaaggacaaataaagcaatgaatacatttaaactcagaccatcgaatggaaaa

SEQ ID NO: 84 - DNA, 6979 bp, Homo sapiens
  misc_feature: Incyte ID No: 331743.9
ggcatggaacctaaagactagaggcggttgtgtgagtcaggaagaggggccagatatctgagtgttcctctttagtttcttcaattgcagataatatggtgtctaattttatgttgttcaggaaagacagtggttcctgactcaggaagacagtctcagaaacatgtggaatgatattgagctgctaacaaatgatgataccggaagtgggtacctgagtgtcggttcaagaaaagaacatggaactgctttatatcaagtagatttgctagtgaagatctcttctgaaaaggcctcattaaatccaaagatacaggcatgcagcttaagtgatgggtttattattgtagccgaccaatcagtgatattgcttgacagtatttgtagatcacttcaattgcatcttgtctttgatactgaagtggatgtagttggcctttgtcaagaaggaaagtttcttttggttggcgagagaagtggcaacctacatcttattcatgtaacatcaaaacaaacactactcactaatgcatttgttcagaaagctaacgatgaaaatcggcggacttaccagaatcttgtcattgagaaggatggttcaaatgaaggtacctattatatgctacttcttacatacagtggatttttttgtattacaaaccttcagcttttaaaaattcaacaagcaattgagaatgtagacttcagtacagcaaaaaagttacaaggacaaatcaagtccagttttatttctactgaaaattatcatactcttggttgtctcagtcttgtggctggagatttagcaagtgaagttcctgtgataattgggggaaccggtaattgtgcattctcaaaatgggaaccagattcttccaagaaaggaatgacagttaagaaccttattgatgcagagattattaaaggtgcaaagaagttccagctgatagacaatctactttttgttcttgatactgataacgtgctgagtttatgggatatttacactctaactcctgtatggaactggccctctcttcacgtagaagagtttcttcttactacagaagcagactctccttcatcagtcacgtggcaaggaattacaaatctcaaattaatagctctgacagcttcagctaataagaagatgaaaaacctcatggtttattcattacctacaatggaaatactatattctttggaagtatctagtgtttcttctctggtccaaacaggaattagcacagataccatataccttttagaaggagtttgcaaaaatgatccaaaattgtctgaagactcagtctctgtgttagtactcagatgtcttacggaagctttaccagaaaacagattgagtcggttacttcacaaacacagatttgctgaagctgagagttttgccattcagtttggactagatgttgagcttgtttacaaggtcaagtcaaatcatatattggagaaactggcattgagttctgtggatgccagtgaacagaccgaatggcaacaacttgtagacgacgctaaggaaaatctacataagatccaggatgatgaatttgtggtgaattactgcctgaaagctcagtggataacctatgaaaccactcaagagatgctgaattatgccaaaaccaggcttttgaagaaagaagataaaactgctctcatttattctgatggcttgaaagaggtgctaagagctcatgcaaaattgactactttttatggagcatttggaccagaaaaattcagtggcagttcttggattgaatttctaaataatgaagatgatcttaaagatatttttttacagctaaaagaaggaaaccttgtttgtgcacagtatctttggcttcgacatcgggcaaactttgaaagcagatttgatgtgaaaatgctggagagcttgctcaactcaatgtctgcatcagtctctttgcaaaagctgtgtccatggtttaaaaatgatgtgattccatttgtaagaaggactgtgcctgaaggacagataattcttgcaaaatggttggaacaagcagccaggaaccttgaattaactgataaggcaaattggccagaaaatggacttcaattggcagagatattttttacagcagaaaaaacagacgagttgggattggcatcttcctggcattggatttccttgaaagattatcagaacacagaggaagtatgtcagctaaggactttggtaaataacttgcgagagttgatcacgttgcataggaagtacaactgcaaattagccctctctgattttgagaaggaaaatacaaccaccatagtgttccgaatgtttgataaagtgctggccccagagcttattccctccatcttagagaagtttataagagtttacatgagagaacatgacttgcaagaggaggaacttctcttgctgtacatagaggatttactgaatagatgcagctcaaagtccacatcactctttgaaacagcatgggaagcaaaggccatggcagtaatagcgtgtttatctgacacggacctcatatttgatgccgtgctcaagatcatgtatgcggcagtggttccttggagtgcagctgtggagcaactggtgaaacagcacctggaaatggaccatcccaaagtcaagttattacaggaaagttacaaactaatggagatgaaaaaacttttacgaggctatggaataagagaggtaaatctcttaaacaaggaaataatgagagtggttagatacattctcaaacaagatgtcccatcttctttagaagatgctttaaaggtagcccaagcgtttatgttatctgatgatgagatctacagtctaagaattattgacctgattgatagagaacagggtgaagactgtctccttctgttgaagtctttgcctcctgctgaagctgagaaaactgcagaaagagtcatcatatgggcacgactggcattacaagaagagccagatcattctaaagagggcaaggcctggagaatgtctgtagcgaagacatccgtggacattcttaagatactatgtgacattcagaaagacaatctgcagaagaaggacgaatgtgaagaaatgttgaaactatttaaagaggttgctagcttacaggagaactttgaggtctttctttcatttgaagattatagcaatagttccctggtagcagatctccgtgagcagcacattaaagctcacgaagttgcacaggcgaaacacaaacctgggagcaccccagagcccatagctgctgaggtgaggagcccaagcatggaatcaaagctgcacagacaggcactggccctgcagatgtccaaacaagagctggaggcagagctgaccttgagagccttaaaagatgggaacatcaaaacagcactgaaaaaatgcagcgacttgtttaagtatcactgcaatgctgacactgggaaattgctatttctgacatgtcagaagctttgtcagatgttggctgataatgtcccagtgacagtgcctgtgggactgaatcttccttccatgatacatgatctagcaagccaagctgccaccatttgcagtccagattttttactagatgctttagaactatgtaaacatactttaatggctgtagagctttccagacaatgccaaatggatgactgtggaatcctcatgaaagcttcttttgggacacataaagatccatatgaagagtggtcttacagtgacttcttcagtgaagatggaattgttcttgagtcacagatggtgcttccagtgatttatgaactgatttcatctcttgtgcctctagctgaaagcaagagatatcccttggagtctaccagtttgccatactgctcccttaatgaaggagatggccttgttttacctgttataaattccatctctgccctgcttcagaatcttcaggaatctagccagtgggagctagccctaagatttgtggttggttcatttggtacctgtcttcagcactctgtgtcaaacttcatgaatgccactttgagtgaaaagttatttggagagactacattagttaaatcaaggcatgttgttatggaattgaaagaaaaagctgttatatttatcagggaaaatgctacaacactactgcacaaagtatttaattgtcgcttggtagatcttgacctggcgttgggttactgcactctcttacctcaaaaagatgtgtttgaaaatctctggaagctcatagataaagcatggcagaattacgacaaaatcttggcaatatctctggtgggctctgagctggcaagtctctatcaggaaatagaaatggggcttaagttccgtgaactcagtactgatgcccagtggggcattcgtcttggtaaacttggtatttcttttcaaccagttttcaggcaacattttctcaccaagaaagacctcattaaagctcttgtggagaatatagatatggacacaagcctcattttggaatattgcagcacatttcagttggactgcgatgcagttcttcagctcttcattgaaacgctgctccacaacacaaatgccggccaaggccagggagatgcaagcatggactctgcaaagcggcggcatcccaaactcctggccaaagcccttgagatggttcctttactgacgagcacaaaagatttggtcatcagtcttagtggaatactacataagttggatccttatgactatgaaatgattgaagttgtcttgaaagttatagaacgagctgatgaaaagataaccaatattaatattaatcaggcattgagtattctgaaacatttgaagtcatacagaagaatttctcctcccgtggatctagaatatcagtatatgttggaacatgtcataactttgccatcagctgcccaaactagactgccttttcacctgatattctttggcacagcacagaacttctggaaaattctctctacagaactcagtgaagaatctttcccaacattgctcttaatttcgaaattaatgaagttctctctggacactctgtacgtgtctacagcaaaacacgttttcgaaaaaaaactgaagccaaagctcctgaagttaacacaagctaaatcctcaacactgattaacaaggaaataactaagatcacgcagaccatcgaatcctgcttactctctatagtcaacccagagtgggctgtagctattgccatcagccttgcccaggatatccctgaaggttccttcaagatatctgctttgaaattctgcctttatttagctgagagatggctacagaatatcccatcgcaggacgaaaaacgtgaaaaagccgaggctttgttgaagaagcttcatatccagtaccggcgatcgggcacagaagctgtgctcatagcccacaagctgaacactgaggaatatttaagagtgatcggaaagccagcacatcttattgtcagtctctacgaacatcctagcatcaatcaaagaattcagaattcatctggcacagattatcctgatattcatgcagcagctaaagaaatagccgaagtcaatgaaattaatttggaaaaagtctgggacatgttgttggaaaaatggctatgcccttcaacaaaacctggtgaaaaaccatcagaattatttgaacttcaagaagatgaagccctacgaagagtgcagtatctcctcctgtctcgtccaattgattatagttcaagaatgctgtttgtatttgcaacatcaactacaaccacattaggtatgcatcagttaacttttgcccatagaactcgagctcttcagtgtctcttctatttggctgacaaggaaactatagaatctctctttaaaaaacccattgaagaagtgaaatcttatttgagatgtataacttttctggcatcatttgagactttgaatatccccatcacatatgaattattttgcagcagtcctaaagaaggaatgattaagggtctgtggaaaaaccacagccacgagtccatggcagtaagattggtgactgagctgtgtttagaatacaaaatctatgacctgcagctttggaatggactcttgcaaaagcttctgggcttcaatatgattccttatctaaggaaagttttaaaagccatctccagtatccattctttatggcaggttccctacttcagcaaagcgtggcagcgtgggatacagataccactgctttcagcctcttgtcctttaagtcctgatcagctgtcagattgttctgagagtctcatcgctgtcctcgaatgtccagtctcaggtgatcttgacctgatcggagtcgccaggcagtatatccagttagaacttccggcttttgcattagcttgtctgatgctcatgccccactcagagaaaagacaccagcaaattaagaattttctgggttcctgtgaccctcaggttattttaaagcaattggaagagcatatgaacacgggccagctagcaggattttcacatcaaattagaagtctgattttgaataatatcatcaataagaaggagtttgggattttggcaaagaccaaatactttcaaatgttgaagatgcatgcgatgaataccaacaatatcactgagctagtgaactatttggcaaatgacttaagtttagatgaagcttcagtcttgataactgaatattcaaagcactgcgggaaacctgtgcctccagacactgctccctgtgaaattctgaagatgtttcttagtggattatcgtaaatcactgaacctttttttcaagaaggacaagaattttggagtctgctattaatggaccatatttattacagtttttaaattgtacaatctctgtattatagctatttgtctaacattaccccacatgtaataaataaaacaatatgagcataattgccccataaagaactcaaaaaaaaaaaaaaa

SEQ ID NO: 85 - DNA, 4998 bp, Homo sapiens
  misc_feature: Incyte ID No: 337334.1
  unsure 3499-3789: a, t, c, g, or other
tgatttggcggctccgactggcgcgggacaaacgccacggccagagtaccgggtagagagcggggacgccgacctgcgtgcgtcggtcctccaggccacgccagcgcccgagagggaccaggagactccggcccctgtcggccgccaagcccctccgcccctcacagcgcccaggtccgcggccgggccttgattttttggcggggaccgtcatggcgtcgcagccaaattcgtctgcgaagaagaaagaggagaaggggaagaacatccaggtggtggtgagatgcagaccatttaatttggcagagcggaaagctagcgcccattcaatagtagaatgtgatcctgtacgaaaagaagttagtgtacgaactggaggattggctgacaagagctcaaggaaaacatacacttttgatatggtgtttggagcatctactaaacagattgatgtttaccgaagtgttgtttgtccaattctggatgaagttattatgggctataattgcactatctttgcgtatggccaaactggcactggaaaaacttttacaatggaaggtgaaaggtcacctaatgaagagtatacctgggaagaggatcccttggctggtataattccacgtacccttcatcaaatttttgagaaacttactgataatggtactgaattttcagtcaaagtgtctctgttggagatctataatgaagagctttttgatcttcttaatccatcatctgatgtttctgagagactacagatgtttgatgatccccgtaacaagagaggagtgataattaaaggtttagaagaaattacagtacacaacaaggatgaagtctatcaaattttagaaaagggggcagcaaaaaggacaactgcagctactctgatgaatgcatactctagtcgttcccactcagttttctctgttacaatacatatgaaagaaactacgattgatggagaagagcttgttaaaatcggaaagttgaacttggttgatcttgcaggaagtgaaaacattggccgttctggagctgttgataagagagctcgggaagctggaaatataaatcaatccctgttgactttgggaagggtcattactgcccttgtagaaagaacacctcatgttccttatcgagaatctaaactaactagaatcctccaggattctcttggagggcgtacaagaacatctataattgcaacaatttctcctgcatctctcaatcttgaggaaactctgagtacattggaatatgctcatagagcaaagaacatattgaataagcctgaagtgaatcagaaactcaccaaaaaagctcttattaaggagtatacggaggagatagaacgtttaaaacgagatcttgctgcagcccgtgagaaaaatggagtgtatatttctgaagaaaattttagagtcatgagtggaaaattaactgttcaagaagagcagattgtagaattgattgaaaaaattggtgctgttgaggaggagctgaatagggttacagagttgtttatggataataaaaatgaacttgaccagtgtaaatctgacctgcaaaataaaacacaagaacttgaaaccactcaaaaacatttgcaagaaactaaattacaacttgttaaagaagaatatatcacatcagctttggaaagtactgaggagaaacttcatgatgctgccagcaagctgcttaacacagttgaagaaactacaaaagatgtatctggtctccattccaaactggatcgtaagaaggcagttgaccaacacaatgcagaagctcaggatatttttggcaaaaacctgaatagtctgtttaataatatggaagaattaattaaggatggcagctcaaagcaaaaggccatgctagaagtacataagaccttatttggtaatctgctgtcttccagtgtctctgcattagataccattactacagtagcacttggatctctcacatctattccagaaaatgtgtctactcatgtttctcagatttttaatatgatactaaaagaacaatcattagcagcagaaagtaaaactgtactacaggaattgattaatgtactcaagactgatcttctaagttcactggaaatgattttatccccaactgtggtgtctatactgaaaatcaatagtcaactaaagcatattttcaagacttcattgacagtggccgataagatagaagatcaaaaaaaggaactagatggctttctcagtatactgtgtaacaatctacatgaactacaagaaaataccatttgttccttggttgagtcacaaaagcaatgtggaaacctaactgaagacctgaagacaataaagcagacccattcccaggaactttgcaagttaatgaatctttggacagagagattctgtgctttggaggaaaagtgtgaaaatatacagaaaccacttagtagtgtccaggaaaatatacagcagaaatctaaggatatagtcaacaaaatgacttttcacagtcaaaaattttgtgctgattctgatggcttctcacaggaactcagaaattttaaccaagaaggtacaaaattggttgaagaatctgtgaaacactctgataaactcaatggcaacctggaaaaaatatctcaagagactgaacagagatgtgaatctctgaacacaagaacagtttatttttctgaacagtgggtatcttccttaaatgaaagggaacaggaacttcacaacttattggaggttgtaagccaatgttgtgaggcttcaagttcagacatcactgagaaatcagatggacgtaaggcagctcatgagaaacagcataacatttttcttgatcagatgactattgatgaagataaattgatagcacaaaatctagaacttaatgaaaccataaaaattggtttgactaagcttaattgctttctggaacaggatctgaaactggatatcccaacaggtacgacaccacagaggaaaagttatttatacccatcaacactggtaagaactgaaccacgtgaacatctccttgatcagctgaaaaggaaacagcctgagctgttaatgatgctaaactgttcagaaaacaacaaagaagagacaattccggatgtggatgtagaagaggcagttctggggcagtatactgaagaacctctaagtcaagagccatctgtagatgctggtgtggattgttcatcaattggcggggttccatttttccagcataaaaaatcacatggaaaagacaaagaaaacagaggcattaacacactggagaggtctaaagtggaagaaactacagagcacttggttacaaagagcagattacctctgcgagcccagatcaacctttaattcacttgggggttggcaattttatttttaaagaaaacttaaaaataaaacctgaaaccccagaacttgagccttgtgtatagattttaaaagaatatatatatcagccgggcgcnnnnnnnnnnnnnnnnnnnnnnnnnnnnnnnnnnnnnnnnnnnnnnnnnnnnnnnnnnnnnnnnnnnnnnnnnnnnnnnnnnnnnnnnnnnnnnnnnnnnnnnnnnnnnnnnnnnnnnnnnnnnnnnnnnnnnnnnnnnnnnnnnnnnnnnnnnnnnnnnnnnnnnnnnnnnnnnnnnnnnnnnnnnnnnnnnnnnnnnnnnnnnnnnnnnnnnnnnnnnnnnnnnnnnnnnnnnnnnnnnnnnnnnnnnnnnnnnnnnnnnnnnnnnnnnnnnnnnnnnnnnnnnnnnnnggcagtactgtaaattcagttgaattttgatatctacccatttttctgtcatccctatagttcactttgtattaaattgggtttcatttgggatttgcaatgtaaatacgtatttctagttttcatataaagtagttcttttataacaaatgaaaagtatttttcttgtatattattaagtaatgaatatataagaactgtactcttctcagcttgagcttacataggtaaatatcaccaacatctgtccttagaaaggaccatctcatgttttttttcttgctatgacttgtgtattttcttgcatcctccctagacttccctatttcgctttctcctcggctcactttctccctttttatttttcaccaaaccatttgtagagctacaaaaggtatcctttcttattttcagtagtcagaattttatctagaaatcttttaacacctttttagtggttatttctaaaatcactgtcaacaataaatctaaccctagttgtatccctcctttcagtatttttcacttgttgccccaaatgtgaaagcatttcattcctttaagaggcctaactcattcaccctgacagagttcacaaaaagcccactttagagtatacattgctattatgggagaccacccagacatctgactaatggctctgtgcccacactccaagacctgtgccttttagagaagctcacaatgatttaaggactgtttgaaacttccaattatgtctataatttatattcttttgtttacatgatgaaactttttgttgttgcttgtttgtatataatacaatgtgtacatgtatctttttctcgattcaaatcttaacccttaggactctggtatttttgatctggcaaccatatttctggaagttgagatgtttcagcttgaagaaccaaaacagaaggaatatgtacaaagaataaattttctgctcacgatgagtttagtgtgtaaagtttagagacatctgactttgatagctaaattaaaccaaaccctattgaagaattgaatatatgctacttcaagaaactaaattgatctcgtagaattatcttaataaaataatggctataatttctctgcaaaatcagatgtcagcataagcgatggataatacctaataaactgccctcagtaaatccatggttaataaatgtggtttctacattacaaaaaaaaaaacag

SEQ ID NO: 86 - DNA, 2460 bp, Homo sapiens
  misc_feature: Incyte ID No: 410438.2
ggggctgatgccaccattccaggagcctcggtgaagagaggatatccatctgtgtagccgcttctctatacgggattccagctccatggcagcccgtctgctcctcctgggcatccttctcctgctgctgcccctgcccgtccctgccccgtgccacacagccgcacgctcagagtgcaagcgcagccacaagttcgtgcctggtgcatggctggccggggagggtgtggacgtgaccagcctccgccgctcgggctccttcccagtggacacacaaaggttcctgcggcccgacggcacctgcaccctctgtgaaaatgccctacaggagggcaccctccagcgcctgcctctggcgctcaccaactggcgggcccagggctctggctgccagcgccatgtaaccagggccaaagtcagctccactgaagctgtggcccgggatgcggctcgtagcatccgcaacgactggaaggtcgggctggacgtgactcctaagcccaccagcaatgtgcatgtgtctgtggccggctcacactcacaggcagccaactttgcagcccagaagacccaccaggaccagtacagcttcagcactgacacggtggagtgccgcttctacagtttccatgtggtacacactcccccgctgcaccctgacttcaagagggccctcggggacctgccccaccacttcaacgcctccacccagcccgcctacctcaggcttatctccaactacggcacccacttcatccgggctgtggagctgggtggccgcatatcggccctcactgccctgcgcacctgcgagctggccctggaagggctcacggacaacgaggtggaggactgcctgactgtcgaggcccaggtcaacataggcatccacggcagcatctctgccgaagccaaggcctgtgaggagaagaagaagaagcacaagatgacggcctccttccaccaaacctaccgggagcgccattcggaagtggttggcggccatcacacctccattaacgacctgctgttcgggatccaggccgggcccgagcagtactcagcctgggtaaactcgctgcccggcagccctggcctggtggactacaccctggaacccctgcacgtgctgctggacagccaggacccgcggcgggaggcactgaggagggccctgagtcagtacctgacggacagggctcgctggagggactgcagccggccgtgcccaccagggcggcagaagagcccccgagacccatgccagtgtgtgtgccatggctcagcggtcaccacccaggactgctgccctcggcagaggggcctggcccagctggaggtgaccttcatccaagcatggggcctgtggggggactggttcactgccacggatgcctatgtgaagctcttctttggtggccaggagctgaggacgagcaccgtgtgggacaataacaaccccatctggtcagtgcggctggattttggggatgtgctcctggccacaggggggcccctgaggttgcaggtctgggatcaggactctggcagggacgatgacctccttggcacctgtgatcaggctcccaagtctggttcccatgaggtgagatgcaacctgaatcatggccacctaaaattccgctatcatgccaggtgcttgccccacctgggaggaggcacctgcctggactatgtcccccaaatgcttctgggggagcctccaggaaaccggagtggggccgtgtggtgagaacagtgagcttggaaaggaccagtatgcttggactgaaggggttctcacagtgggagccagggctgtcttcgtattcccattagaccaagcttatccaacccgaggcccgcatgcggcccaggatggctttgaatgcggcccaacgcaaattcgcaaactttcttaaaacattatgagtttctttttgctatttttttttttttttttagctcatcggctatcgttagtgctagtggattttacatggggcccaaaaaaattttttttccaagggggcccagagaacccaaaaattggggatccgcttcaaaacagatggaaaagggagattcagactgtttttcagggaggtggctgggtttacacgctaatcccgattcaccctgtccaaactgcctaagccctccgccattctcaagccctgcagtcacagctacacagatcacagcttcagccaggagctgggcagaaggccaagaggctgttcccaccaggctgctcagggctggtcttttaggacccttcccttgagccctctatggtgtggcaaagccttcattgccttaactggagccccatcagctccagctgctctgtcttctttgcccacaatgctttgcccctgagacaaatggaggcctgtcctgacctgtctcaccatgtacatagcttgataaagggccaataaatatgatgttatggtg

SEQ ID NO: 87 - DNA, 3327 bp, Homo sapiens
  misc_feature: Incyte ID No: 453004.32
ctctttctctctccctctggcatgcatgctgctggtaggagacccccaagtcaacattgcttcagaaatcctttagcactcatttctcaggagaacttatggcttcagaatcacagctcggtttttaagatggacataacctgtacgaccttctgatgggctttcaactttgaactggatgtggacacttttctctcagatgacagaattactccaacttcccctttgcagttgcttcctttccttgaaggtagctgtatcttattttctttaaaaagctttttcttccaaagccacttgccatgccgaccgtcattagcgcatctgtggctccaaggacagcggctgagccccggtccccagggccagttcctcacccggcccagagcaaggccactgaggctgggggtggaaacccaagtggcatctattcagccatcatcagccgcaattttcctattatcggagtgaaagagaagacattcgagcaacttcacaagaaatgtctagaaaagaaagttctttatgtggaccctgagttcccaccggatgagacctctctcttttatagccagaagttccccatccagttcgtctggaagagacctccggaaatttgcgagaatccccgatttatcattgatggagccaacagaactgacatctgtcaaggagagctaggggactgctggtttctcgcagccattgcctgcctgaccctgaaccagcaccttcttttccgagtcataccccatgatcaaagtttcatcgaaaactacgcagggatcttccacttccagttctggcgctatggagagtgggtggacgtggttatagatgactgcctgccaacgtacaacaatcaactggttttcaccaagtccaaccaccgcaatgagttctggagtgctctgctggagaaggcttatgctaagctccatggttcctacgaagctctgaaaggtgggaacaccacagaggccatggaggacttcacaggaggggtggcagagttttttgagatcagggatgctcctagtgacatgtacaagatcatgaagaaagccatcgagagaggctccctcatgggctgctccattgatgatggcacgaacatgacctatggaacctctccttctggtctgaacatgggggagttgattgcacggatggtaaggaatatggataactcactgctccaggactcagacctcgaccccagaggctcagatgaaagaccgacccggacaatcattccggttcagtatgagacaagaatggcctgcgggctggtcagaggtcacgcctactctgtcacggggctggatgaggtcccgttcaaaggtgagaaagtgaagctggtgcggctgcggaatccgtggggccaggtggagtggaacggttcttggagtgatagatggaaggactggagctttgtggacaaagatgagaaggcccgtctgcagcaccaggtcactgaggatggagagttctggatgtcctatgaggatttcatctaccatttcacaaagttggagatctgcaacctcacggccgatgctctgcagtctgacaagcttcagacctggacagtgtctgtgaacgagggccgctgggtacggggttgctctgccggaggctgccgcaacttcccagatactttctggaccaaccctcagtaccgtctgaagctcctggaggaggacgatgaccctgatgactcggaggtgatttgcagcttcctggtggccctgatgcagaagaaccggcggaaggaccggaagctaggggccagtctcttcaccattggcttcgccatctacgaggttcccaaagagatgcacgggaacaagcagcacctgcagaaggacttcttcctgtacaacgcctccaaggccaggagcaaaacctacatcaacatgcgggaggtgtcccagcgcttccgcctgcctcccagcgagtacgtcatcgtgccctccacctacgagccccaccaggagggggaattcatcctccgggtcttctctgaaaagaggaacctctctgaggaagttgaaaataccatctccgtggatcggccagtgaaaaagaaaaaaaccaagcccatcatcttcgtttcggacagagcaaacagcaacaaggagctgggtgtggaccaggagtcagaggagggcaaaggcaaaacaagccctgataagcaaaagcagtccccacagccacagcctggcagctctgatcaggaaagtgaggaacagcaacaattccggaacattttcaagcagatagcaggagatgacatggagatctgtgcagatgagctcaagaaggtccttaacacagtcgtgaacaaacacaaggacctgaagacacacgggttcacactggagtcctgccgtagcatgattgcgctcatggatacagatggctctggaaagctcaacctgcaggagttccaccacctctggaacaagattaaggcctggcagaaaattttcaaacactatgacacagaccagtccggcaccatcaacagctacgagatgcgaaatgcagtcaacgacgcaggattccacctcaacaaccagctctatgacatcattaccatgcggtacgcagacaaacacatgaacatcgactttgacagtttcatctgctgcttcgttaggctggagggcatgttcagagcttttcatgcatttgacaaggatggagatggtatcatcaagctcaacgttctggagtggctgcagctcaccatgtatgcctgaaccaggctggcctcatccaaagccatgcaggatcactcaggatttcagtttcaccctctatttccaaagccatttacctcaaaggacccagcagctacacccctacaggcttccaggcacctcatcagtcatgttcctcctccattttaccccctacccatccttgatcggtcatgcctagcctgaccctttagtaaagcaatgaggtaggaagaacaaacccttgtccctttgccatgtggaggaaagtgcctgcctctggtccgagccgcctcggttctgaagcgagtgctcctgcttaccttgctctaggctgtctgcagaagcacctgccggtggcactcagcacctccttgtgctagagccctccatcaccttcacgctgtcccaccatgggccaggaaccaaaccagcactgggttctactgctgtggggtaaactaactcagtggaatagggctggttactttgggctgtccaactcataagtttggctgcattttgaaaaaagctgatctaaataaaggcatgtgtatggctggtcaaaaaaaaaaaaaaa

SEQ ID NO: 88 - DNA, 4034 bp, Homo sapiens
  misc_feature: Incyte ID No: 236319.2
tgtgtcttcccacccttagtcccaggcatctgactaccgggaacctcagccagagtccgggagccccccaccccgtccaggagccaacagagcccccgtcttgctggcgtgagaatacattgctctcctttggttgaatcagctgtccctcttcgtgggaaaatgaaccagaagacaatcctcgtgctcctcattctggccgtcatcaccatctttgccttggtttgtgtcctgctggtgggcaggggtggagatgggggtgaacccagccagcttccccattgcccctctgtatctcccagtgcccagccttggacacaccctggccagagccagctgtttgcagacctgagccgagaggagctgacggctgtgatgcgctttctgacccagcggctggggccagggctggtggatgcagcccaggcccggccctcggacaactgtgtcttctcagtggagttgcagctgcctcccaaggctgcagccctggctcacttggacagggggagccccccacctgcccgggaggcactggccatcgtcttctttggcaggcaaccccagcccaacgtgagtgagctggtggtggggccactgcctcacccctcctacatgcgggacgtgactgtggagcgtcatggaggccccctgccctatcaccgacgccccgtgctgttccaagagtacctggacatagaccagatgatcttcaacagagagctgccccaggcttctgggcttctccaccactgttgcttctacaagcaccggggacggaacctggtgacaatgaccacggctccccgtggtctgcaatcaggggaccgggccacctggtttggcctctactacaacatctcgggcgctgggttcttcctgcaccacgtgggcttggagctgctagtgaaccacaaggcccttgaccctgcccgctggactatccagaaggtgttctatcaaggccgctactacgacagcctggcccagctggaggcccagtttgaggccggcctggtgaatgtggtgctgatcccagacaatggcacaggtgggtcctggtccctgaagtcccctgtgcccccgggtccagctccccctctacagttctatccccaaggcccccgcttcagtgtccagggaagtcgagtggcctcctcactgtggactttctcctttggcctcggagcattcagtggcccaaggatctttgacgttcgcttccaaggagaaagactagtttatgagataagcctccaagaggccttggccatctatggtggaaattccccagcagcaatgacgacccgctatgtggatggaggctttggcatgggcaagtacaccacgcccctgacccgtggggtggactgcccctacttggccacctacgtggactggcacttccttttggagtcccaggcccccaagacaatacatgatgccttttgtgtgtttgaacagaaccagggcctccccctgcggcgacaccactcagatctctactcgcactactttgggggtcttgcggaaacggtgctggtcgtcagatctatgtccaccttgctcaactatgactatgtgtgggatacggtcttccaccccagtggggccatagaaatacgattctatgccacgggctacatcagctcggcattcctctttggtgctactgggaagtacgggaaccaagtgtcagagcacaccctgggcacggtccacacccacagcgcccacttcaaggtggatctggatgtagcaggactggagaactgggtctgggccgaggatatggtctttgtccccatggctgtgccctggagccctgagcaccagctgcagaggctgcaggtgacccggaagctgctggagatggaggagcaggccgccttcctcgtgggaagcgccacccctcgctacctgtacctggccagcaaccacagcaacaagtggggtcacccccgggggctaccgcatccagatgctcagctttgctggagagccgctgccccaaaacagctccatggcgagaggcttcagctgggagaggtaccagctggctgtgacccagcggaaggaggaggagcccagtagcagcagcgttttcaatcagaatgacccttgggcccccactgtggatttcagtgacttcatcaacaatgagaccattgctggaaaggatttggtggcctgggtgacagctggttttctgcatatcccacatgcagaggacattcctaacacagtgactgtggggaacggcgtgggcttcttcctccgaccctataacttctttgacgaagacccctccttctactctgccgactccatctacttccgaggggaccaggatgctggggcctgcgaggtcaaccccctagcttgcctgccccaggctgctgcctgtgccccccgacctccctgccttctcccacgggggcttctctcacaactaggcggtcctgggatggggcatgtggccaagggctccagggccagggtgtgagggatggggagcagctgggcactgggccggcagcctggttccctctttcctgtgccaggactctctttcttccactaccctccctcgcatccgcctctgagccaggagcctcctgaccctgtgatgcctgacacaggggacactgaaccttgttgatgccagctgtactgagttctcatccacagaggccaggcatggcccagcctggagccgtggccgagggcttccctagatggttccctttgttgctgtctggctttcccgaatctttttaggccacctccaaggactctaaaagggggctattccctggagaccccagagtagggttgccagtcctgcaagtccatagctgagctggaaaggatgcttctgctcacattccctctcatccaggtcctttccttctcgtcttcctctctctcacctacttcctcctcctcctcctgttcctgccttctcttctatcctgcaatttctcccgaatcctgaggggatatccctatgtcccagcccctggtactcccccagccctcagttttcagtcaagttccgtctcctctccagccctatggaagtctcaaggtcacgggacccctaatcagagtggccaatccctgtgtgtcgttcccttgtgtctgttgcttattgggagtaggagttgctcctacccctgtcctggggctgggtgtgtttcaggacagctgcttctgtgcatttgtgtctgcctgcctcatgctctctatagaggaggatggtcatcgtgacagcagcagctcaagttagcatttcaagtgatttgggggtgcaatgataatgaagaatggccattttgtaccagggctctgtattctgcaacagcctgtttgggaggctggagtggaaacaaagggtgggcatcaaagatgagaagccaaagcccctacaactccagccacccagccaggaggggctgtccaatcacattcaggcatgcgaatgagctgggccctgggtgaggtgggggtctggcctagtggggaggggcctggcctgggtggggcagggcctggcctggtccaggcttgggctccattcccatcactgctgtccctcctgaggtctggattggggatggggacaaagaaatagcaagagatgagaaacaacagaaacttttttctctaaaggactggttaaatcaattctgatacagccttacaatacaatagtatgcagctaaaaaataattgtatgtctttatatactaatatgtaataatcttcaggtgaaaaaggcaagccacagaaatgtgtatagcgcacttcccatttgtgtttcagaaaggagtagaatataaacacataattgcttatgtatgcctattcagaataaatgggtaacactgattacttttgggaggggaaccagtaggttgaggacaggagagggaagggtcttaacacttacacccttttgtacattttgaattttgaaccatgtgactgtattacctattcaaaataaacaataaatgggcccaaacagg

SEQ ID NO: 89 - DNA, 1509 bp, Homo sapiens
  misc_feature: Incyte ID No: 978118.5
  unsure 31, 46: a, t, c, g, or other
ccaggggaagtccctggacttcttgcttctntcgtgtaggacaggntgtcgaaacctcagtggataaaagacctagagaatgtgtatcccagaagaagctggccaaggatatgggagcaaccaccatggaccagaagtctctctgggcaggtgtagtggtcttgctgcttctccagggaggatctgcctacaaactggtttgctactttaccaactggtcccaggaccggcaggaaccaggaaaattcacccctgagaatattgaccccttcctatgctctcatctcatctattcattcgccagcatcgaaaacaacaaggttatcatcaaggacaagagtgaagtgatgctctaccagaccatcaacagtctcaaaaccaagaatcccaaactgaaaattctcttgtccattggagggtacctgtttggttccaaagggttccaccctatggtggattcttctacatcacgcttggaattcattaactccataatcctgtttctgaggaaccataactttgatggactggatgtaagctggatctacccagatcagaaagaaaacactcatttcactgtgctgattcatgagttagcagaagcctttcagaaggacttcacaaaatccaccaaggaaaggcttctcttgactgcgggcgtatctgcagggaggcaaatgattgataacagctatcaagttgagaaactggcaaaagatctggatttcatcaacctcctgtcctttgacttccatgggtcttgggaaaagccccttatcactggccacaacagccctctgagcaaggggtggcaggacagagggccaagctcctactacaatgtggaatatgctgtggggtactggatacataagggaatgccatcagagaaggtggtcatgggcatccccacatatgggcactccttcacactggcctctgcagaaaccaccgtgggggcccctgcctctggccctggagctgctggacccatcacagagtcttcaggcttcctggcctattatgagatctgccagttcctgaaaggagccaagatcacgcggctccaggatcagcaggttccctacgcagtcaaggggaaccagtgggtgggctatgatgatgtgaagagtatggagaccaaggttcagttcttaaagaatttaaacctgggaggagccatgatctggtctattgacatggatgacttcactggcaaatcctgcaaccagggcccttaccctcttgtccaagcagtcaagagaagccttggctccctgtgaaggattaacttacagagaagcaggcaagatgaccttgctgcctggggcctgctctctcccaggaattctcatgtgggattccccttgccaggatggcctttggatctctcttccaagcctttcctgacttcctcttagatcatagattggacctggttttgttttcctgcagctgttgacttgttgccctgaagtacaataaaaaaaattcattttgctccagtaa

SEQ ID NO: 90 - DNA, 5602 bp, Homo sapiens
  misc_feature: Incyte ID No: 1383177.16
ggcggcgcgctgaggaggcggtgcgctcaggcggcgctcccggagatgccccgcggcagccgcgctcggggctctaagagaaaaaggagttggaatacagaatgcccatcctttccaggagaaagaccactgcaggtcagaagagcaggtctcaggacagcaggggcagctgcctctctctctgaagcatggctcaggtgtggagaagggtttcagaacacttctgggaatccgtcattaacagctgaagagaagacgattacagaaaagcaccttgaattatgccctagacccaagcaagaaaccaccacatctaaaagcaccagtgggcttacagacataacatggagctccagtggaagtgatttgtcggatgaagataagacactttctcagttacagagagatgaattacagtttatcgactgggagattgacagtgacagggcagaggctagtgactgtgatgaatttgaagatgacgagggtgctgtggaaatctcagactgtgcttcttgtgcaagtaatcagtctttgacaagtgatgagaagctgtcggagcttcccaagccaagttctatagaaattttagagtattcatcagatagtgaaaaagaagatgatttggaaaatgtcctactcattgattcagaatcccctcacaaataccacgtgcagtttgcatcggatgcaagacagattatggagagactgatagatccaaggacaaaatcaacagagaccattttgcatacacctcagaaacccacagctaagtttcccaggactccagaaaattcagcaaagaagaagcttttaagaggtggactagcagaaagactaaatggactgcagaatcgagagagatctgctatttctttgtggagacatcaatgtatttcttaccaaaagacactttcaggtagaaaatctggtgtattaactgtgaaaattttagagctgcatgaggaatgtgccatgcaagttgccatgtgtgagcagttattggggtcaccagccaccagctcctcccaaagtgtggctcccaggcctggagctggcctgaaagttctcttcaccaaggagactgcaggctacctcaggggccgtccccaggacactgtccggatcttccctccctggcaaaaactgattattccaagtggaagttgccctgttattctgaatacttacttttgtgagaaagttgttgccaaagaagattcagaaaaaacttgtgaagtgtactgtccggacataccccttccaagaagaagcatctctttggcccagatgtttgtaattaagggtctaacaaataattcacctgaaatccaggttgtgtgtagtggtgtagccactacagggacagcctggacccatgggcacaaagaagcaaaacagcgcatcccaaccagcactcccctgagggattctctcctggatgtggtggaaagccagggagctgcctcgtggccaggagctggagtccgagtggtggtgcaaagagtgtattctcttcccagcagagacagcaccaggggtcagcagggggccagctcaggacacacagacccagctggaactcgagcctgccttctggtacaagatgcctgtggaatgttcggtgaagtgcacttggagttcaccatgtcgaaggcaagacagttggaagggaagtcttgcagcctggtgggaatgaaggttctacagaaagtcaccagaggaaggacagcggggattttcagtttgattgacaccctgtggcccccagcgatacctctgaaaacacctggccgcgaccagccctgtgaagagataaaaactcatctgcctcctccagccttgtgttacatcctcacagctcatccaaatctgggacaaattgatataattgacgaagaccccatttataagctttaccagcctccagttacccgctgcttaagagacattctccagatgaatgatcttggtacccgttgcagtttctatgccacggtgatttaccaaaaaccacagctgaagagtctgctgcttctggagcaaagggagatctggctgctagtgaccgatgtcactctgcaaacgaaggaggagagagaccccaggctccccaaaaccctgctggtctatgtggcccccttgtgtgtgctgggctctgaagtcctggaggcactcgctggggctgcccctcacagcctcttcttcaaggacgctctccgtgaccagggtcggattgtttgtgctgaacgaactgtcctcttgcttcagaagccccttttgagtgtggtctctggtgcaagttcctgtgagctgcctggcccggtgatgctcgacagcctggactctgcaacacctgtcaactccatctgcagtgttcaaggcactgtggttggcgtggacgagagcactgctttctcatggcctgtgtgtgacatgtgtggcaacgggagattggaacagaggccggaagacagaggcgccttttcctgtggggactgctcccgggtggtcacatctcctgttctcaagaggcacctgcaggtcttcctggactgccgctcaagaccgcagtgcagagtgaaggtcaagctgttgcagcgcagcatttcctccctgctgaggtttgccgccggtgaagatgggagctacgaagtgaagagtgtcctcggaaaggaagtggggttgttaaattgttttgtccagtccgtaaccgcccacccgaccagctgcattggattggaggaaatcgagcttctgagtgcaggaggggcctctgcagaacactagcggttgccgcaggatctgtgaactttgcaatgtggctgcaagggtggtggtggtggtggtgatttggggtagttatttgttaactatggacacagtgaacgtagtttacgatcttgaaatgaaacttagatttttctggggaaatgttcagatacagttttgtgaactgtaaatcaaaatacctttttctacagtttatcttttattttctgcaaatttaggaacatatttactcgttttcacattgaatcttaagtttaagctcttcatttggtatttaggcaatatatgagaaaaaaattttttttgttcatttgtaattttaacaagttgaacattttaccatgattgaacatgtttttattacagtatttaacattcccccaaagaataccctgcaaagtgtaaacctttgtcccatactgtgatattactgttctgctacaataaatgtcaaacctaagcactttgcagttcactacttttgggaaaatgttctagggaactgtatcacaggtgaaactgttacccataaagtgtagctctctgaactggtgtgatcgtgtctctgctgaatggtggtggggatagctggctccaccacacacacctgttttaattaggctgggtaatgtgcacggagagcaaagatcacagactaaggagcagtcagtcggatatttgctttgctggcaaagatttaaaccaagaattaattatctttggacactataaagattttgttcccttccttatagcaatataatcatgacaggccatggttaactacatcagatacacgtagcagccgtgaccaagacatggtgccctaataccaagtgttcttgggttaaaggcaggcggctttttaattaaatcttaaagcactgcaattactggcaagacagctggtcttaagcagttttgtgactgcccttttcatccactacatgactattccggcctttctggagcacttttgaaaatctacttgactctgtccacaagactgaggaaagtgaaagcaaagtcccgggaaagcgggagatgattcagcccggggttctgcccctcgcccctccagcagcctctacagttagggagctcttgaactgttctcagcaggggcccccaaaaagtcaacccttccccaggtctgcgttcttcgggagaacaccttctgctggaaagctgctagcttacctgagctcagccgtgctccacctagcttaggcaagttaaataaggccaggagagagcctttaatgcgttttaaaagcgacagaccctctctcctgagtagctcgggcctgcgccccatccccccgccccccacacacacacctggcgcccgggctccctggtgctcgctggctgcgggtccggaacgcacccttcccgagccgggtcctgcgccaccggcgggcgggcgggagtcactgcgaatataggaagcaggggcgatttcaaatgctgctttattcttacaaatactgtaaaaattaatataaaaaagtgagcatgctgagtcttttcctcttatctacaatacaaagggtttgtctgaaaagtctggttttttttctttttacaaatgtaccttagctgcatcaacaggagtaagatgtagaaaaagctaccattacaaaaataatttaagggaaaataaacacgtttagcttctctcgcagtttagtggtggtaagtccaggctgtagcttctttgcgctcctatgtcccaagaaactgcagcgggcacccggcggctctggctgcgccagggcagggcgcgctccgctccgggccgtcgggtctgaggtatgggtcgttgctgagtctctcccgccccggccgcgcgttaccggcagtctgctgtcccggcggccggcaggaagggcgggctgggcagctgcttgaagaactgccggaggccggccaggtcccgcgtgagctgctccacgcgctggtgcagcttctcgttctcagccgacagctccaccaacttctgctgcatctcctggttgcgccgcttggccttgtcgcggctcttgcgcacggcgatgttgttgcgctcgcgccgctgccggtactcggggctgccgcggtccgggcccctcttgccggcgctcttctcccgggcggggccgggcgcgggggtctgcctggggctgctgcgcggcggctccggcgacgtgggcggggtgggctgccctgcggccgccaagctcaccacggtctgtgcgcacgcggccacctgcgcgggcaacagcgagccgggcgcgtcgccgtcgccccagtcgggctcgcgcttgagcaggcggggagcggcagggcccgggcccaaggggcgcgcggggccgccgggaagaagctccaggggccccgcgccgcccgccttgtgattgctgttgaagaggtcggcgaagagctcgtcgtggcacagctccagggtgggcacggcggccatggagtcgatgtaggcgctgaagtcgatggcgctctcgtcgtcgtacatggcgggggcggcggcgcctggctcgcctagggcccctggctcggccccgcggcccggcttgcccgcccggcccggttcgtagaagggcgcaggctccgcaggccagggcgcgccgcgcgccgggccgtccaggctgaagagcgcggcgctcatggcggcgtcgggccgggctctgcgccgcgtccagaagtttttcacgaaattatagaacaaagtttaccacaatggatctctaacctgaaaaaggtaaatattcccctttgcttttcattatcattgttcattctttcagat

SEQ ID NO: 91 - DNA, 1810 bp, Homo sapiens
  misc_feature: Incyte ID No: 1383298.1
ggtaggtaaggaaggggccttaacctctgctggtgaccagaagcctgcatttctgcattctgcttaattccctttccttagatttgaaagaagccaacactaaaccacaaatatacaacaaggccattttctcaaacgagagtcagcctttaacgaaatgaccatggttgacacagagatgccattctggcccaccaactttgggatcagctccgtggatctctccgtaatggaagaccactcccactcctttgatatcaagcccttcactactgttgacttctccagcatttctactccacattacgaagacattccattcacaagaacagatccagtggttgcagattacaagtatgacctgaaacttcaagagtaccaaagtgcaatcaaagtggagcctgcatctccaccttattattctgagaagactcagctctacaataagcctcatgaagagccttccaactccctcatggcaattgaatgtcgtgtctgtggagataaagcttctggatttcactatggagttcatgcttgtgaaggatgcaagggtttcttccggagaacaatcagattgaagcttatctatgacagatgtgatcttaactgtcggatccacaaaaaaagtagaaataaatgtcagtactgtcggtttcagaaatgccttgcagtggggatgtctcataatgccatcaggtttgggcggatgccacaggccgagaaggagaagctgttggcggagatctccagtgatatcgaccagctgaatccagagtccgctgacctccgggccctggcaaaacatttgtatgactcatacataaagtccttcccgctgaccaaagcaaaggcgagggcgatcttgacaggaaagacaacagacaaatcaccattcgttatctatgacatgaattccttaatgatgggagaagataaaatcaagttcaaacacatcacccccctgcaggagcagagcaaagaggtggccatccgcatctttcagggctgccagtttcgctccgtggaggctgtgcaggagatcacagagtatgccaaaagcattcctggttttgtaaatcttgacttgaacgaccaagtaactctcctcaaatatggagtccacgagatcatttacacaatgctggcctccttgatgaataaagatggggttctcatatccgagggccaaggcttcatgacaagggagtttctaaagagcctgcgaaagccttttggtgactttatggagcccaagtttgagtttgctgtgaagttcaatgcactggaattagatgacagcgacttggcaatatttattgctgtcattattctcagtggagaccgcccaggtttgctgaatgtgaagcccattgaagacattcaagacaacctgctacaagccctggagctccagctgaagctgaaccaccctgagtcctcacagctgtttgccaagctgctccagaaaatgacagacctcagacagattgtcacggaacacgtgcagctactgcaggtgatcaagaagacggagacagacatgagtcttcacccgctcctgcaggagatctacaaggacttgtactagcagagagtcctgagccactgccaacatttcccttcttccagttgcactattctgagggaaaatctgacacctaagaaatttactgtgaaaaagcattttaaaaagaaaaggttttagaatatgatctattttatgcatattgtttataaagacacatttacaatttacttttaatattaaaaattaccatattatgaaaaaaaaaaaaaaaggggccca

SEQ ID NO: 92 - DNA, 1449 bp, Homo sapiens
  misc_feature: Incyte ID No: 1000222.20
ctgccatttaggacaagctggatgatgatggtttgatagctccaggggttcgtgtataggagatgatgaatctgcttcatccagaatcacaatcttaaaaggcgggaactgaggcgactgtggggacatcagtgatcgtaagtctcctgggcccgttattctcagattaggtgacggagctaagacttcgagaccatctcgtcctttttgtatcgcggaaacctgaggaacgagccggcggcggtgacctgcacgagaagccaggctaactgggtgaagtaccatgcaagcatttcttaaaggtacatccatcagtactaaacccccgctgaccaaggatcgaggagtagctgccagtgcgggaagtagcggagagaacaagaaagccaaacccgttccctgggtggaaaaatatcgcccaaaatgtgtggactgaagttggccctttccaggaagaagtggttgcagtgctgaaaaaaaaatctttagaaggagcagatcttcctaatctctgttttacggaccacctggaactggaaaaacatccactattttggcagcagctagagaactctttgggcctgaacttttccgattaagagttcttgagttaaatgcatctgatgaacgtggaatacaagtagttcgagagaaagtgaaaaattttgctcaattaactgtgtcaggaagtcgctcagatgggaagccgtgtccgccttttaagattgtgattctggatgaagcagattctatgacctcagctgctcaggcagctttaagacgtaccatggagaaggagtcgaaaaccacccgattctgtcttatctgtaactatgtcagtcgaataattgaacccctgacctctagatgttcaaaattccgcttcaagcctctgtcagataaaattcaacagcagcgattactagacattgccaagaaggaaaatgtcaaaattagtgatgagggaatagcttatcttgttaaagtgtcagaaggagacttaagaaaagccattacatttcttcaaagcgctactcgattaacaggtggaaaggagatcacagagaaagtgattacagacattgctggggtaataccagctgagaaaattgatggagtatttgctgcctgtcagagtggctcttttgacaaactagaagctgtggtcaaggatttaatagatgagggtcatgcagcaactcagctcgtcaatcaactccatgatgtggttgtagaaaataacttatctgataaacagaagtctattatcacagaaaaacttgccgaagttgacaaatgcctagcagatggtgctgatgaacatttgcaactcatcagcctttgtgcaactgtgatgcagcagttatctcagaattgttaacgtgaatatatctggatggggggttttgtaaataatgaagttgtaataaaaataaaatgaccaaaagc

SEQ ID NO: 93 - DNA, 5147 bp, Homo sapiens
  misc_feature: Incyte ID No: 1096863.27
  unsure 4859: a, t, c, g, or other
gcgcgcgcgacgcaggtgcccgagccccggcccgcgcccatctctgccttcggtcgagttggacccccggatcaaggtgtacttctctgaagtaagatgatttgtcaaaaattctgtgtggttttgttacattgggaatttatttatgtgataactgcgtttaacttgtcatatccaattactccttggagatttaagttgtcttgcatgccaccaaattcaacctatgactacttccttttgcctgctggactctcaaagaatacttcaaattcgaatggacattatgagacagctgttgaacctaagtttaattcaagtggtactcacttttctaacttatccaaagcaactttccactgttgctttcggagtgagcaagatagaaactgctccttatgtgcagacaacattgaaggaaggacatttgtttcaacagtaaattctttagtttttcaacaaatagatgcaaactggaacatacagtgctggctaaaaggagacttaaaattattcatctgttatgtggagtcattatttaagaatctattcaggaattataactataaggtccatcttttatatgttctgcctgaagtgttagaagattcacctctggttccccaaaaaggcagttttcagatggttcactgcaattgcagtgttcatgaatgttgtgaatgtcttgtgcctgtgccaacagccaaactcaacgacactctccttatgtgtttgaaaatcacatctggtggagtaattttccggtcacctctaatgtcagttcagcccataaatatggtgaagcctgatccaccattaggtttgcatatggaaatcacagatgatggtaatttaaagatttcttggtccagcccaccattggtaccatttccacttcaatatcaagtgaaatattcagagaattctacaacagttatcagagaagctgacaagattgtctcagctacatccctgctagtagacagtatacttcctgggtcttcgtatgaggttcaggtgaggggcaagagactggatggcccaggaatctggagtgactggagtactcctcgtgtctttaccacacaagatgtcatatactttccacctaaaattctgacaagtgttgggtctaatgtttcttttcactgcatctataagaaggaaaacaagattgttccctcaaaagagattgtttggtggatgaatttagctgagaaaattcctcaaagccagtatgatgttgtgagtgatcatgttagcaaagttacttttttcaatctgaatgaaaccaaacctcgaggaaagtttacctatgatgcagtgtactgctgcaatgaacatgaatgccatcatcgctatgctgaattatatgtgattgatgtcaatatcaatatctcatgtgaaactgatgggtacttaactaaaatgacttgcagatggtcaaccagtacaatccagtcacttgcggaaagcactttgcaattgaggtatcataggagcagcctttactgttctgatattccatctattcatcccatatctgagcccaaagattgctatttgcagagtgatggtttttatgaatgcattttccagccaatcttcctattatctggctacacaatgtggattaggatcaatcactctctaggttcacttgactctccaccaacatgtgtccttcctgattctgtggtgaagccactgcctccatccagtgtgaaagcagaaattactataaacattggattattgaaaatatcttgggaaaagccagtctttccagagaataaccttcaattccagattcgctatggtttaagtggaaaagaagtacaatggaagatgtatgaggtttatgatgcaaaatcaaaatctgtcagtctcccagttccagacttgtgtgcagtctatgctgttcaggtgcgctgtaagaggctagatggactgggatattggagtaattggagcaatccagcctacacagttgtcatggatataaaagttcctatgagaggacctgaattttggagaataattaatggagatactatgaaaaaggagaaaaatgtcactttactttggaagcccctgcatgaaaaatgactcattgtgcagtgttcagagatatgtgataaaccatcatacttcctgcaatggaacatggtcagaagatgtgggaaatcacacgaaattcactttcctgtgagacagagcaagcacatactgtaacggtgtctggccatcaattcaattggtgcttctgttgcaaattttaatataaccttttcatggccctatgagcaaagtaaatatcgtgcagatcactcaggtgcttatcctttaaacagcagtatgctgatgattgttatcctggaattactatcacccagtgattacaagctaagtgtattttattattgagtggaaaaagtcttaactgaacgagtggtgaaactacaaagtggcttagaatctcttcagtctgttaagacagtattatatccatgatcattttatccccattgagaagtaccagttcagtctgttacccaatatttatggaaggagtgggaaaaccaaagataattaatagttatcactcaagatgatattgaaaaacaccagagtgatgcaggtttatatgtaatatgtgccagtaattatattccatctatccatcgttattcgcttggaacagttattaatatcacaaccaaagaatgaaaaagctatttagggaagatgttccgaaccccaagaattgttcctgggcacaaggacttaattttcagaagagaacggacattctttgaagtctaatcatgatcactacagatgaacccaatgtgccaacttcccaacagtctatagagtattagaagatttttacattttgaagaaggggagcaaatctaaaaaaaattcagttgaacttctgagagttaacatatggtggattatgttgatttagaacttaaaatagatgtgtaaatttgggttcaaaatgtagatttgagtccagtttggatgtgtgattaattttcaaatcatctaaagtttaaaagtagtattcatgatttctggcttttgatttgtcatattcctggtcataaaacattaagaaaattatggctgttgctgtcattacatatctattaaatgtccatcaaatatgtagtagacaatgctgtaattaggtgaactctaaaactgcaacatctggcaaatagctttaaaaatacaatggttataagtatggaatcagtgaaaatatttagtttgtatttttatgtccaaacgttttccattttagattccttttatagacacgtcagcctaaaaatcagcctattcgggtgttcttttgaaatatctccctgggcatttttggtatctaaactttgttcaatctgggaatttcagttttcaatatccttgaaaatggcttaagtgataacttcccgtttcagttaaaaggaagcccgaagttgtgtttgtgctgcccacaggacagtgggagttacagttcatatcaggatgaccctacatacccaggtcagattgacgggaccagaagggaacatcgacttctaatccagctttcttgtttaattatgacctaaatctaattttacttcccactgaaccatcccaagacctctggcaggcagggaaatggggcagtgatgcaaaaaggggagactctttggagcttttatgaactagttcatggctgaggacagaactttttctactttcagacagactgcttgactagttttatgaattcagcacacgaattatgctggtggttgctcacatttcaaaccaaaccaacgactatgtttaatgaactcagtatttaaatctaaatataaggaatccatatatacatatatatgtatatatggatcccttatatttagatttaactccgtagttttatttgaaagtagaaaagaactctacaaaaacgggaagaatgtgtctttcttcccttcttgacttctaataggtgtcattgaaatgtaaaatctaagtatgaaattatgaaaggacattctttaattactgcccactcaacacatatttaatatgtgcccagattattctaaaatcttaaaaaaagatgcatatagtgaaattttttaaatggatatacttttaataaagttttataactcactgacaaaacatatttcaatagtatatgagtatgagatttcttatcaattatgagtgaaatattctatctgaatgcattggaaggcatttacagtatttggtttcaacagttacctgagtatgacattttaggcatgaaatatatcaaacacatcatttgaaggacatatgtaatcttgactatggttatggtttttttgtatgtattccttgttttcatattgatagcatctaattcttttgacaatcttaatatgtaggttcatttgaaattttaagacagttccagtgcatatatagtagaagccttaagaaaaaagaaaatgagcacagccaatatttgaagaaatgtataaaaccatagatttctttcagaaaaaaaaaaacagggcataggaacagttttctgcttgcatatattatgattatgaataataggaaagttggtattaattcagtatttgaccattatgcagtattttaatacctacataagtctattccagttattatattttgccgcttgggcatatttattccctttatgcttttaatcactaacatattttacttaagagtataaaactatgctaaataaattgtattgtatatggaatatgcttgccattatggaaggaccagctggggtataccattatttcaagtanattaaatctggaattctattagtttaaaaatggtcaaaattcaagttaaatggacgtgtatgatatataagctgaacacatttttctatagccccttaatttagttgtgttaatttttcaaggtgatgtatcaacagccttttttaattttgcatttgttcttttcaatgtgtttacattgtatgaattgaggctttttggcccacagattcttgatttgtagttgtttggcaggatttttctttgtgatataatcacttctataaaaaatatgatgtacaaaaaaaa

SEQ ID NO: 94 - DNA, 2159 bp, Homo sapiens
  misc_feature: Incyte ID No: 245334.1
cctagctgggatattggagcagcaagaggctgggaagccatcacttaccttgcactgagaaagaagacaaaggccagtatgcacagctttcctccactgctgctgctgctgttctggggtgtggtgtctcacagcttcccagcgactctagaaacacaagagcaagatgtggacttagtccagaaatacctggaaaaatactacaacctgaagaatgatgggaggcaagttgaaaagcggagaaatagtggcccagtggttgaaaaattgaagcaaatgcaggaattctttgggctgaaagtgactgggaaaccagatgctgaaaccctgaaggtgatgaagcagcccagatgtggagtgcctgatgtggctcagtttgtcctcactgaggggaaccctcgctgggagcaaacacatctgacctacaggattgaaaattacacgccagatttgccaagagcagatgtggaccatgccattgagaaagccttccaactctggagtaatgtcacacctctgacattcaccaaggtctctgagggtcaagcagacatcatgatatcttttgtcaggggagatcatcgggacaactctccttttgatggacctggaggaaatcttgctcatgcttttcaaccaggcccaggtattggaggggatgctcattttgatgaagatgaaaggtggaccaacaatttcagagagtacaacttacatcgtgttgcggctcatgaactcggccattctcttggactctcccattctactgatatcggggctttgatgtaccctagctacaccttcagtggtgatgttcagctagctcaggatgacattgatggcatccaagccatatatggacgttcccaaaatcctgtccagcccatcggcccacaaaccccaaaagcgtgtgacagtaagctaacctttgatgctataactacgattcggggagaagtgatgttctttaaagacagattctacatgcgcacaaatcccttctacccggaagttgagctcaatttcatttctgttttctggccacaactgccaaatgggcttgaagctgcttacgaatttgccgacagagatgaagtccggtttttcaaagggaataagtactgggctgttcagggacagaatgtgctacacggataccccaaggacatctacagctcctttggcttccctagaactgtgaagcatatcgatgctgctctttctgaggaaaacactggaaaaacctacttctttgttgctaacaaatactggaggtatgatgaatataaacgatctatggatccaggttatcccaaaatgatagcacatgactttcctggaattggccacaaagttgatgcagttttcatgaaagatggatttttctatttctttcatggaacaagacaatacaaatttgatcctaaaacgaagagaattttgactctccagaaagctaatagctggttcaactgcaggaaaaattgaacattactaatttgaatggaaaacacatggtgtgagtccaaaggaggtgttttcctgaagaactgtctattttctcagtcatttttaacctctagagtcactgatacacagaatataatcttatttatacctcagtttgcatatttttttactatttagaatgtagccctttttgtactgatataatttagttccacaaatggtgggtacaaaaagtcaagtttgtggcttatggattcatataggccagagttgcaaagatcttttctagagtatgcaactctgacgttgatcccagagagcagcttcagtgacaaacatatcctttcaagacagaaagagacaggagacatgagtctttgccggaggaaaagcagctcaagaacacatgtgcagtcactggtgtcaccctggataggcaagggataactcttctaacacaaaataagtgttttatgtttggaataaagtcaaccttgtttctactgttttaaaaggatatgtttgtcactgaagctgctctctgggatcaacgtcagagttgcatactctagaaaagatctttgcaactcaggcctatatgaatccataagccacaaacttgactttttgtacacacaatttgtggaactaaattatatcagtacaaaaagggctacattctaaatagt

SEQ ID NO: 95 - DNA, 1740 bp, Homo sapiens
  misc_feature: Incyte ID No: 1656674CB1
gaaccatgaggctcatcctgcctgtgggtttgattgctaccactcttgcaattgctcctgtccgctttgacagggagaaggtgttccgcgtgaagccccaggatgaaaaacaagcagacatcataaaggacttggccaaaaccaatgagcttgacttctggtatccaggtgccacccaccacgtagctgctaatatgatggtggatttccgagttagtgagaaggaatcccaagccatccagtctgccttggatcaaaataaaatgcactatgaaatcttgattcatgatctacaagaagagattgagaaacagtttgatgttaaagaagatatcccaggcaggcacagctacgcaaaatacaataattgggaaaagattgtggcttggactgaaaagatgatggataagtatcctgaaatggtctctcgtattaaaattggatctactgttgaagataatccactatatgttctgaagattggggaaaagaatgaaagaagaaaggctatttttatggattgtggcattcacgcacgagaatgggtctccccagcattctgccagtggtttgtctatcaggcaaccaaaacttatgggagaaacaaaattatgaccaaactcttggaccgaatgaatttttacattcttcctgtgttcaatgttgatggatatatttggtcatggacaaagaaccgcatgtggagaaaaaatcgttccaagaaccaaaactccaaatgcatcggcactgacctcaacaggaattttaatgcttcatggaactccattcctaacaccaatgacccatgtgcagataactatcggggctctgcaccagagtccgagaaagagacgaaagctgtcactaatttcattagaagccacctgaatgaaatcaaggtttacatcaccttccattcctactcccagatgctattgtttccctatggatatacatcaaaactgccacctaaccatgaggacttggccaaagttgcaaagattggcactgatgttctatcaactcgatatgaaacccgctacatctatggcccaatagaatcaacaatttacccgatatcaggttcttctttagactgggcttatgacctgggcatcaaacacacatttgcctttgagctccgagataaaggcaaatttggttttctccttccagaatcccggataaagccaacgtgcagagagaccatgctagctgtcaaatttattgccaagtatatcctcaagcatacttcctaaagaactgccctctgtttggaataagccaattaatccttttttgtgcctttcatcagaaagtcaatcttcagttatccccaaatgcagcttctatttcacctgaatccttctcttgctcatttaagtcccatgttactgctgtttgcttttacttactttcagtagcaccataacgaagtagctttaagtgaaaccttttaactacctttctttgctccaagtgaagtttggacccagcagaaagcattattttgaaaggtgatatacagtggggcacagaaaacaaatgaaaaccctcagtttctcacagattttcaccatgtggcttcatcaatttatgtgctaatacaataaaataaaatgcacttaatgctttaaaattcatctttttatgataaactatattctctgtatttctctatagcattaataatcaatattaatgccattcattcagtctgttaataagaaataatatctc

SEQ ID NO: 96 - DNA, 2348 bp, Homo sapiens
  misc_feature: Incyte ID No: 522678CB1
agcagctgcagtcagacacctctgccctcaccatgagcctctggcagcccctggtcctggtgctcctggtgctgggctgctgctttgctgcccccagacagcgccagtccacccttgtgctcttccctggagacctgagaaccaatctcaccgacaggcagctggcagaggaatacctgtaccgctatggttacactcgggtggcagagatgcgtggagagtcgaaatctctggggcctgcgctgctgcttctccagaagcaactgtccctgcccgagaccggtgagctggatagcgccacgctgaaggccatgcgaaccccacggtgcggggtcccagacctgggcagattccaaacctttgagggcgacctcaagtggcaccaccacaacatcacctattggatccaaaactactcggaagacttgccgcgggcggtgattgacgacgcctttgcccgcgccttcgcactgtggagcgcggtgacgccgctcaccttcactcgcgtgtacagccgggacgcagacatcgtcatccagtttggtgtcgcggagcacggagacgggtatcccttcgacgggaaggacgggctcctggcacacgcctttcctcctggccccggcattcagggagacgcccatttcgacgatgacgagttgtggtccctgggcaagggcgtcgtggttccaactcggtttggaaacgcagatggcgcggcctgccacttccccttcatcttcgagggccgctcctactctgcctgcaccaccgacggtcgctccgacggcttgccctggtgcagtaccacggccaactacgacaccgacgaccggtttggcttctgccccagcgagagactctacacccaggacggcaatgctgatgggaaaccctgccagtttccattcatcttccaaggccaatcctactccgcctgcaccacggacggtcgctccgacggctaccgctggtgcgccaccaccgccaactacgaccgggacaagctcttcggcttctgcccgacccgagctgactcgacggtgatggggggcaactcggcgggggagctgtgcgtcttccccttcactttcctgggtaaggagtactcgacctgtaccagcgagggccgcggagatgggcgcctctggtgcgctaccacctcgaactttgacagcgacaagaagtggggcttctgcccggaccaaggatacagtttgttcctcgtggcggcgcatgagttcggccacgcgctgggcttagatcattcctcagtgccggaggcgctcatgtaccctatgtaccgcttcactgaggggccccccttgcataaggacgacgtgaatggcatccggcacctctatggtcctcgccctgaacctgagccacggcctccaaccaccaccacaccgcagcccacggctcccccgacggtctgccccaccggaccccccactgtccacccctcagagcgccccacagctggccccacaggtcccccctcagctggccccacaggtccccccactgctggcccttctacggccactactgtgcctttgagtccggtggacgatgcctgcaacgtgaacatcttcgacgccatcgcggagattgggaaccagctgtatttgttcaaggatgggaagtactggcgattctctgagggcagggggagccggccgcagggccccttccttatcgccgacaagtggcccgcgctgccccgcaagctggactcggtctttgaggagccgctctccaagaagcttttcttcttctctgggcgccaggtgtgggtgtacacaggcgcgtcggtgctgggcccgaggcgtctggacaagctgggcctgggcgccgacgtggcccaggtgaccggggccctccggagtggcagggggaagatgctgctgttcagcgggcggcgcctctggaggttcgacgtgaaggcgcagatggtggatccccggagcgccagcgaggtggaccggatgttccccggggtgcctttggacacgcacgacgtcttccagtaccgagagaaagcctatttctgccaggaccgcttctactggcgcgtgagttcccggagtgagttgaaccaggtggaccaagtgggctacgtgacctatgacatcctgcagtgccctgaggactagggttcccgtcctgctttggcagtgccatgtaaatccccactgggaccaaccctggggaaggagccagtttgccggatacaaactggtattctgttctggaggaaagggaggagtggaggtgggctgggccctctcttctcacctttgttttttgttggagtgtttctaataaacttggattctctaaccttt

SEQ ID NO: 97 - DNA, 1834 bp, Homo sapiens
  misc_feature: Incyte ID No: 1424985CB1
catgagcccgggatccgcctccctccgccaggacccgcacagataaactcatcctgaaagtcgctgttgttctcctgctgagcaagaatggaggccccactggtgagtctggatgaagagtttgaggaccttcgaccctcctgctcggaggacccggaggagaagccccagtgtttctatggttcatctccccaccatctcgaggacccctccctctccgagcttgagaatttttcttccgaaataatcagcttcaagtccatggaggacctcgtaaatgaatttgatgagaagctcaatgtctgctttcggaactacaacgccaagaccgagaacctagctcccgtgaagaaccagttacagatccaagaggaggaggagacccttcaggacgaggaggtttgggatgctctgacagacaattacatcccttcactctcagaagactggagggatccaaacatcgaggctctgaatggcaactgctctgacactgagatccatgagaaagaagaggaagagttcaatgagaagagtgaaaatgattccggtatcaacgaggagcctctgctcacagcagatcaggtaattgaggagattgaggaaatgatgcagaactccccagaccctgaggaagaagaggaggttctggaagaagaggatggaggagaaacttcctcccaggcagactcggtcctcctgcaggagatgcaggcattgacacagaccttcaacaacaactggtcctatgaagggctgaggcacatgtctgggtctgagctgaccgagctgctggaccaggtggagggtgccatccgtgacttctcggaggagctggtgcagcagctggcccgccgggacgagctggagtttgagaaggaagtgaagaactcctttatcacggtgcttattgaggttcagaacaagcagaaggagcagcgagaactgatgaaaaagaggcggaaagagaaagggctgagcctgcagagcagccggatagagaagggaaaccagatgcctctcaagcgcttcagcatggaaggcatctccaacattctgcagagtggcatccgccagacctttggctcctcaggaactgacaaacagtatctgaacacagtcattccttacgagaagaaagcctctcctccctcagtggaagacctgcagatgctgacaaacattctctttgccatgaaggaggataatgagaaggtgcctactttgctaacggactacattttaaaagtgctctgccctacctaaccttgccctttggagcagcctcgctgcaggaggtcactgagcaagagtcattccatcacagggactgcatgagaccatgtaacctccgacatgtatttaaacgtgtatagcttaacctggattaaacacgagcaagcgcgcggggtcctttgccgttggcttctagtgctagtaatcattggatgcatgatggggcagggccggtgatggtgcctcccccttgctggtgtcaggagaggggaaggcagccgctttcaccgctcattatgtagtctggctacagccctcaaaaacagcttatactcttaagactaattttgaaataaaaccttcatttcatctgtagggagcaagagattatagaaaaggggggggcagcccaggggtcccccggggggcccagcttgggggttattgagtgataggtccccccctgaacggggcgtcatgtgaaggagcttggactctttgaaggagctgacttcagggggggactaatgggaagctacaagggggtttagcctccgggggatacggcttttgggggttaaggggtaacaacctcctt

SEQ ID NO: 98 - DNA, 2429 bp, Homo sapiens
  misc_feature: Incyte ID No: 1468237CB1
gcgctgcccgcccagttcctgttcccagactgaggcccagcccccttcgcccgtttccatcacgagtgccgccagcatgtctgacaaactgccctacaaagtcgccgacatcggcctggctgcctggggacgcaaggccctggacattgctgagaacgagatgccgggcctgatgcgtatgcgggagcggtactcggcctccaagccactgaagggcgcccgcatcgctggctgcctgcacatgaccgtggagacggccgtcctcattgagaccctcgtcaccctgggtgctgaggtgcagtggtccagctgcaacatcttctccacccaggaccatgcggcggctgccattgccaaggctggcattccggtgtatgcctggaagggcgaaacggacgaggagtacctgtggtgcattgagcagaccctgtacttcaaggacgggcccctcaacatgattctggacgacgggggcgacctcaccaacctcatccacaccaagtacccgcagcttctgccaggcatccgaggcatctctgaggagaccacgactggggtccacaacctctacaagatgatggccaatgggatcctcaaggtgcctgccatcaatgtcaatgactccgtcaccaagagcaagtttgacaacctctatggctgccgggagtccctcatagatggcatcaagcgggccacagatgtgatgattgccggcaaggtagcggtggtagcaggctatggtgatgtgggcaagggctgtgcccaggccctgcggggtttcggagcccgcgtcatcatcaccgagattgaccccatcaacgcactgcaggctgccatggagggctatgaggtgaccaccatggatgaggcctgtcaggagggcaacatctttgtcaccaccacaggctgtattgacatcatccttggccggcactttgagcagatgaaggatgatgccattgtgtgtaacattggacactttgacgtggagatcgatgtcaagtggctcaacgagaacgccgtggagaaggtgaacatcaagccgcaggtggaccggtatcggttgaagaatgggcgccgcatcatcctgctggccgagggtcggctggtcaacctgggttgtgccatgggccaccccagcttcgtgatgagtaactccttcaccaaccaggtgatggcgcagatcgagctgtggacccatccagacaagtaccccgttggggttcatttcctgcccaagaagctggatgaggcagtggctgaagcccacctgggcaagctgaatgtgaagttgaccaagctaactgagaagcaagcccagtacctgggcatgtcctgtgatggccccttcaagccggatcactaccgctactgagagccaggtctgcgtttcaccctccagctgctgtccttgcccaggccccacctctcctccctaagagctaatggcaccaactttgtgattggtttgtcagtgtcccccatcgactctctggggctgatcacttagtttttggcctctgctgcagccgtcatactgttccaaatgtggcagcgggaacagagtaccctcttcaagccccggtcatgatggaggtcccagccacagggaaccatgagctcagtggtcttggaacagctcactaagtcagtccttccttagcctggaagtcagtagtggagtcacaaagcccatgtgttttgccatctaggccttcacctggtctgtggacttatacctgtgtgcttggtttacaggtccagtggttcttcagcccatgacagatgagaaggggctatattgaagggcaaagaggaactgttgtttgaattttcctgagagcctggcttagtgctgggccttctcttaaacctcattacaatgaggttagtacttttagtccctgttttacaggggttagaatagactgttaaggggcaactgagaaagaacagagaagtgacagctaggggttgagaggggccagaaaaacatgaatgcaggcagatttcgtgaaatctgccaccactttataaccagatggttcctttcacaaccctgggtcaaaaagagaataatttggcctataatgttaaaagaaagcaggaaggtgggtaaataaaaatcttggtgcctggaaaaaaaaaaaaaaaaaaaaaggcggccgcccttttttttttttgttaaattagagacagggtctcactacattgcctagattggtctcaaactcctgggctcaagcaatcttcctctcttggcctcccaaagtgttgggattgcaggtgtgcgccactaggcccagcttgaaaaattttttaatgcatgtggtaatccacaggagatcacatttagtatatgaccaagttaattaagaagtcaaaaaacacgttaaatttaagcagaataaggctggttcaggtggctc

SEQ ID NO: 99 - DNA, 2424 bp, Homo sapiens
  misc_feature: Incyte ID No: 337008.1
tcagtaacactgaatgtcagtgcagtccaatttacaggctggagcagcagctgcatcctgcatttccccgaagtattacatgattttcactccttgcaaactttgccatctttgttgcagagaatcggaaatcaatatgcatagcaaagtcacaatcatatgcatcagatttctcttttggtttcttttgctctgcatgcttattgggaagtcacatactgaagatgacatcataattgcaacaaagaatggaaaagtcagagggatgaacttgacagtttttggtggcacggtaacagcctttcttggaattccctatgcacagccacctcttggtagacttcgattcaaaaagccacagtctctgaccaagtggtctgatatttggaatgccacaaaatatgcaaattcttgctgtcagaacatagatcaaagttttccaggcttccatggatcagagatgtggaacccaaacactgacctcagtgaagactgtttatatctaaatgtatggattccagcacctaaaccaaaaaatgccactgtattgatatggatttatggtggtggttttcaaactggaacatcatctttacatgtttatgatggcaagtttctggctcgggttgaaagagttattgtagtgtcaatgaactatagggtgggtgccctaggattcttagctttgccaggaaatcctgaggctccagggaacatgggtttatttgatcaacagttggctcttcagtgggttcaaaaaaaatatagcagcctttggtggaaaccctaaaagtgtaactctctttggagaaagtgcaggagcagcttcagttagcctgcatttgctttctcctggaagccattcattgttcaccagagccattctgcaaagtggatcctttaatgctccttgggcggtaacatctctttatgaagctaggaacagaacgttgaacttagctaaattgactggttgctctagagagaatgagactgaaataatcaagtgtcttagaaataaagatccccaagaaattcttctgaatgaagcatttgttgtcccctatgggactcctttgtcagtaaactttggtccgaccgtggatggtgattttctcactgacatgccagacatattacttgaacttggacaatttaaaaaaacccagattttggtgggtgttaataaagatgaagggacagcttttttagtctatggtgctcctggcttcagcaaagataacaatagtatcataactagaaaagaatttcaggaaggtttaaaaatattttttccaggagtgagtgagtttggaaaggaatccatcctttttcattacacagactgggtagatgatcagagacctgaaaactaccgtgaggccttgggtgatgttgttggggattataatttcatatgccctgccttggagttcaccaagaagttctcagaatggggaaataatgcctttttctactattttgaacaccgatcctccaaacttccgtggccagaatggatgggagtgatgcatggctatgaaattgaatttgtctttggtttacctctggaaagaagagataattacacaaaagccgaggaaattttgagtagatccatagtgaaacggtgggcaaattttgcaaaatatgggaatccaaatgagactcagaacaatagcacaagctggcctgtcttcaaaagcactgaacaaaaatatctaaccttgaatacagagtcaacaagaataatgacgaaactacgtgctcaacaatgtcgattctggacatcattttttccaaaagtcttggaaatgacaggaaatattgatgaagcagaatgggagtggaaagcaggattccatcgctggaacaattacatgatggactggaaaaatcaatttaacgattacactagcaagaaagaaagttgtgtgggtctctaattaatagatttaccctttatagaacatattttcctttagatcaaggcaaaaatatcaggagcttttttacacacctactaaaaaagttattatgtagctgaaacaaaaatgccagaaggataatattgattcctcacatctttaacttagtattttacctagcatttcaaaacccaaatggctagaacgtgtttaattaaatttcacaatataaagttctacagttaattatgtgcatattaaaacaatggcctggttcaatttctttctttccttaataaatttaagttttttccccccaaaattatcagtgctctgcttttagtcacgtgtattttcattaccactcgtaaaaaggtatcttttttaaatgaattaaatattgaaacactgtacaccatagtttacaatattatgtttcctaattaaaataagaattgaatgtcaatatgagatattaaaataagcacagaaaatc

SEQ ID NO: 100 - DNA, 3024 bp, Homo sapiens
  misc_feature: Incyte ID No: 444850.9
ggctctgaagccattacaaaggttgcttaacttctaattatttgatcactgaggaaaatccagaaagctacacaacactgaaggggtgaaataaaagtccagcgatccagcgaaagaaaagagaagtgacagaaacaactttacctggactgaagataaaagcacagacaagagaacaatgccctggacatggctccagagatccacatgacaggcccaatgtgcctcattgagaacactaatggggaactggtggcgaatccagaagctctgaaaatcctgtctgccattacacagcctgtggtggtggtggcaattgtgggcctctaccgcacaggaaaatcctacctgatgaacaagctagctgggaagaataagggcttctctctgggctccacagtgaaatctcacaccaaaggaatctggatgtggtgtgtgcctcaccccaaaaagccagaacacaccttagtcctgcttgacactgagggcctgggagatgtaaagaagggtgacaaccagaatgactcctggatcttcaccctggccgtcctcctgagcagcactctcgtgtacaatagcatgggaaccatcaaccagcaggctatggaccaactgtactatgtgacagagctgacacatcgaatccgatcaaaatcctcacctgatgagaatgagaatgaggattcagctgactttgtgagcttcttcccagattttgtgtggacactgagagatttctccctggacttggaagcagatggacaacccctcacaccagatgagtacctggagtattccctgaagctaacgcaaggtaccagtcaaaaagataaaaattttaatctgccccaactctgtatctggaagttcttcccaaagaaaaaatgttttgtcttcgatctgcccattcaccgcaggaagcttgcccagcttgagaaactacaagatgaagagctggaccctgaatttgtgcaacaagtagcagacttctgttcctacatctttagcaattccaaaactaaaactctttcaggaggcatcaaggtcaatgggcctcgtctagagagcctagtgctgacctatatcaatgctatcagcagaggggatctgccctgcatggagaacgcagtcctggccttggcccagatagagaactcagccgcagtgcaaaaggctattgcccactatgaccagcagatgggccagaaggtgcagctgcccgcagaaaccctccaggagctgctggacctgcacagggttagtgagagggaggccactgaagtctatatgaagaactctttcaaggatgtggaccatctgtttcaaaagaaattagcggcccagctagacaaaaagcgggatgacttttgtaaacagaatcaagaagcatcatcagatcgttgctcagctttacttcaggtcattttcagtcctctagaagaagaagtgaaggcgggaatttattcgaaaccagggggctattgtctctttattcagaagctacaagacctggagaaaaagtactatgaggaaccaaggaaggggatacaggctgaagagattctgcagacatacttgaaatccaaggagtctgtgaccgatgcaattctacagacagaccagattctcacagaaaaggaaaaggagattgaagtggaatgtgtaaaagctgaatctgcacaggcttcagcaaaaatggtggaggaaatgcaaataaagtatcagcagatgatggaagagaaagagaagagttatcaagaacatgtgaaacaattgactgagaagatggagagggagagggcccagttgctggaagagcaagagaagaccctcactagtaaacttcaggaacaggcccgagtactaaaggagagatgccaaggtgaaagtacccaacttcaaaatgagatacaaaagctacagaagaccctgaaaaaaaaaaccaagagatatatgtcgcataagctaaagatctaaacaacagagcttttctgtcatcctaacccaaggcataactgaaacaattttagaatttggaacaagtgtcactatatttgataataattagatcttgcatcataacactaaaagtttacaagaacatgcagttcaatgatcaaaatcatgttttttccttaaaaagattgtaaattgtgcaacaaagatgcatttacctctgtaccaacagaggagggatcatgagttgccaccactcagaagtttattcttccagacgaccagtggatactaaggaaagtcttaggtaaaaatcttgggacatatttgggcactggtttggccaagtgtacaatgggtcccaatatcagaaacaaccatcctagcttcctagggaagacagtgtacagttctccattatatcaaggctacaaggtctatgagcaataatgtgatttctggacattgcccatggataattctcactgatggatctcaagctaaagcaaaccatcttatacagagatctagaatcttatattttccataggaaggtaaagaaatcattagcaagagtaggaattgaatcataaacaaattggctaatgaagaaatcttttctttcttgttcaattcatctagattataaccttaatgtgacacctgagacctttagacagttgaccctgaattaaatagtcacatggtaacaattatgcactgtgtaattttagtaatgtataacatgcaatgatgcactttaactgaagatagagactatgttagaaaattgaactaatttaattatttgattgttttaatcctaaagcataagttagtcttttcctgattcttaaaggtcatacttgaaatcctgccaattttccccaaagggaatatggaatttttttgactttcttttgagcaataaaataattgtcttgccattacttagtatatgtagacttcatcccaattgtcaaacatcctaggtaagtggttgacatttcttacagcaattacagattatttttgaactagaaataaactaaactagaaataaaaaaa

SEQ ID NO: 101 - DNA, 2101 bp, Homo sapiens
  misc_feature: Incyte ID No: 786284CB1
cgtgcttcaggtaacctcccttgaccttcaggagaacgagaaggctgcctgatcagagagtccctgaagaagattctgtggctacaggcttcagcagagtgtgagggagaccccggttatttcctcagctatttccaccaaatcctcctgtctttcgtggccaacaccccaggcaaggcttggggcccccgtctgctgctggacgcagagccatgaagaagaagttagtggtgctgggcctgctggccgtggtcctggtgctggtcattgtcggcctctgtctctggctgccctcagcctccaaggaacctgacaaccatgtgtacaccagggctgccgtggccgcggatgccaagcagtgctcggagattgggagggatgcactgcgggacggtggctctgcggtggatgcagccattgcagccctgttgtgtgtggggctcatgaatgcccacagcatgggcatcgggggtggcctcttcctcaccatctacaacagcaccacacgaaaagctgaggtcatcaacgcccgcgaggtggcccccaggctggcctttgccaccatgttcaacagctcggagcagtcccagaagggggggctgtcggtggcggtgcctggggagatccgaggctatgagctggcacaccagcggcatgggcggctgccctgggctcgcctcttccagcccagcatccagctggcccgccagggcttccccgtgggcaagggcttggcggcagccctggaaaacaagcggaccgtcatcgagcagcagcctgtcttgtgtgaggtgttctgccgggatagaaaggtgcttcgggagggggagagactgaccctgccgcagctggctgacacctacgagacgctggccatcgagggtgcccaggccttctacaacggcagcctcacggcccagattgtgaaggacatccaggcggccgggggcattgtgacagctgaggacctgaacaactaccgtgctgagctgatcgagcacccgctgaacatcagcctgggagacgcggtgctgtacatgcccagtgcgccgctcagcgggcccgtgctggccctcatcctcaacatcctcaaagggtacaacttctcccgggagagcgtggagagccccgagcagaagggcctgacgtaccaccgcatcgtagaggctttccggtttgcctacgccaagaggaccctgcttggggaccccaagtttgtggatgtgactgaggtggtccgcaacatgacctccgagttcttcgctgcccagctccgggcccagatctctgacgacaccactcacccgatctcctactacaagcccgagttctacacgccggatgacgggggcactgctcacctgtctgtcgtcgcagaggacggcagtgctgtgtccgccaccagcaccatcaacctctactttggctccaaggtccgctccccggtcagcgggatcctgttcaataatgaaatggacgacttcagctctcccagcatcaccaacgagtttggggtacccccctcacctgccaatttcatccagccagggaagcagccgctctcgtccatgtgcccgacgatcatggtgggccaggacggccaggtccggatggtggtgggagctgctgggggcacacagatcaccacggccactgcactggccatcatctacaacctctggttcggctatgacgtgaagcgggccgtggaggagccccggctgcacaaccagcttctgcccaacgtcacgacagtggagagaaacattgaccaggcagtgactgcagccctggagacccggcaccatcacacccagatcgcgtccaccttcatcgctgtggtgcaagccatcgtccgcacggctggtggctgggcagctgcctcggactccaggaaaggcggggagcctgccggctactgagtgctccaggaggacaaggctgacaagcaatccagggacaagatactcaccaggaccaggaaggggactctgggggaccggcttcccctgtgagcagcagagcagcacaataaatgaggccactgtgccaggctccaggtggcctccctggcctgtctccccaaaaaaaaaaaaaaagg

SEQ ID NO: 102 - DNA, 3165 bp, Homo sapiens
  misc_feature: Incyte ID No: 1352170CB1
ccggtttccagccatggctgccattacctgaccagcgccacagccggtctctctgcaggcgccgggagaagtgaccagagcaatttctgcttttcacagggcgggtttctcaacggtgacttgtgggcagtgccttctgctgagcgagtcatggcccgaaggcagaactaactgtgcctgcagtcttcactctcaggatgcagccgaggtgggcccaaggggccacgatgtggcttggagtcctgctgacccttctgctctgttcaagccttgagggtcaagaaaactctttcacaatcaacagtgttgacatgaagagcctgccggactggacggtgcaaaatgggaagaacctgaccctgcagtgcttcgcggatgtcagcaccacctctcacgtcaagcctcagcaccagatgctgttctataaggatgacgtgctgttttacaacatctcctccatgaagagcacagagagttattttattcctgaagtccggatctatgactcagggacatataaatgtactgtgattgtgaacaacaaagagaaaaccactgcagagtaccagctgttggtggaaggagtgcccagtcccagggtgacactggacaagaaagaggccatccaaggtgggatcgtgagggtcaactgttctgtcccagaggaaaaggccccaatacacttcacaattgaaaaacttgaactaaatgaaaaaatggtcaagctgaaaagagagaagaattctcgagaccagaattttgtgatactggaattccccgttgaggaacaggaccgcgttttatccttccgatgtcaagctaggatcatttctgggatccatatgcagacctcagaatctaccaagagtgaactggtcaccgtgacggaatccttctctacacccaagttccacatcagccccaccggaatgatcatggaaggagctcagctccacattaagtgcaccattcaagtgactcacctggcccaggagtttccagaaatcataattcagaaggacaaggcgattgtggcccacaacagacatggcaacaaggctgtgtactcagtcatggccatggtggagcacagtggcaactacacgtgcaaagtggagtccagccgcatatccaaggtcagcagcatcgtggtcaacataacagaactattttccaagcccgaactggaatcttccttcacacatctggaccaaggtgaaagactgaacctgtcctgctccatcccaggagcacctccagccaacttcaccatccagaaggaagatacgattgtgtcacagactcaagatttcaccaagatagcctcaaagtcggacagtgggacgtatatctgcactgcaggtattgacaaagtggtcaagaaaagcaacacagtccagatagtcgtatgtgaaatgctctcccagcccaggatttcttatgatgcccagtttgaggtcataaaaggacagaccatcgaagtccgttgcgaatcgatcagtggaactttgcctatttcttaccaacttttaaaaacaagtaaagttttggagaatagtaccaagaactcaaatgatcctgcggtattcaaagacaaccccactgaagacgtcgaataccagtgtgttgcagataattgccattcccacgccaaaatgttaagtgaggttctgagggtgaaggtgatagccccggtggatgaggtccagatttctatcctgtcaagtaaggtggtggagtctggagaggacattgtgctgcaatgtgctgtgaatgaaggatctggtcccatcacctataagttttacagagaaaaagagggcaaacccttctatcaaatgacctcaaatgccacccaggcattttggaccaagcagaaggctaacaaggaacaggagggagagtattactgcacagccttcaacagagccaaccacgcctccagtgtccccagaagcaaaatactgacagtcagagtcattcttgccccatggaagaaaggacttattgcagtggttatcatcggagtgatcattgctctcttgatcattgcggccaaatgttattttctgaggaaagccaaggccaagcagatgccagtggaaatgtccaggccagcagtaccacttctgaactccaacaacgagaaaatgtcagatcccaatatggaagctaacagtcattacggtcacaatgacgatgtcggaaaccatgcaatgaaaccaataaatgataataaagagcctctgaactcagacgtgcagtacacggaagttcaagtgtcctcagctgagtctcacaaagatctaggaaagaaggacacagagacagtgtacagtgaagtccggaaagctgtccctgatgccgtggaaagcagatactctagaacggaaggctcccttgatggaacttagacagcaaggccagatgcacatccctggaaggacatccatgttccgagaagaacagataatccctgtatttcaagacctctgtgcacttatttatgaacctgccctgctcccacagaacacagcaattcctcaggctaagctgccggttcttaaatccatcctgctaagttaatgttgggtagaaagagatacagaggggctgttgaatttcccacataccctccttccaccaagttggaacatccttggaaattggaagagcacaagaggagatccagggcaaggccattgggatattctgaaacttgaatattttgttttgtgcagagataaagaccttttccatgcaccctcatacacagaaaccaattttcttttttatactcaatcatttctagcgcatggcctggttagaggctggttttttctcttttcctttggtccttcaaaggcttgtagttttggctagtccttgttctttggaaatacacagtgctgaccagacagcctccccctgtcccctctatgacctcgccctccacaaatgggaaaaccagactacttgggagcaccgcctgtgaaataccaacctgaagacacggttcattcaggcaacgcacaaaacagaaaatgaaggtggaacaagcacagatgttcttcaactgtttttgtctacactctttctcttttcctctaccatgctgaaggctgaaagacaggaagatggtgccatcagcaaatattattcggc

SEQ ID NO: 103 - DNA, 3286 bp, Homo sapiens
  misc_feature: Incyte ID No: 1815320CB1
ctgagctctgccgcctggctctagccgcctgcctggcccccgccgggactcttgcccaccctcagccatggctccgatatctctgtcgtggctgctccgcttggccaccttctgccatctgactgtcctgctggctggacagcaccacggtgtgacgaaatgcaacatcacgtgcagcaagatgacatcaaagatacctgtagctttgctcatccactatcaacagaaccaggcatcatgcggcaaacgcgcaatcatcttggagacgagacagcacaggctgttctgtgccgacccgaaggagcaatgggtcaaggacgcgatgcagcatctggaccgccaggctgctgccctaactcgaaatggcggcaccttcgagaagcagatcggcgaggtgaagcccaggaccacccctgccgccgggggaatggacgagtctgtggtcctggagcccgaagccacaggcgaaagcagtagcctggagccgactccttcttcccaggaagcacagagggccctggggacctccccagagctgccgacgggcgtgactggttcctcagggaccaggctccccccgacgccaaaggctcaggatggagggcctgtgggcacggagcttttccgagtgcctcccgtctccactgccgccacgtggcagagttctgctccccaccaacctgggcccagcctctgggctgaggcaaagacctctgaggccccgtccacccaggacccctccacccaggcctccactgcgtcctccccagccccagaggagaatgctccgtctgaaggccagcgtgtgtggggtcagggacagagccccaggccagagaactctctggagcgggaggagatgggtcccgtgccagcgcacacggatgccttccaggactgggggcctggcagcatggcccacgtctctgtggtccctgtctcctcagaagggacccccagcagggagccagtggcttcaggcagctggacccctaaggctgaggaacccatccatgccaccatggacccccagaggctgggcgtccttatcactcctgtccctgacgcccaggctgccacccggaggcaggcggtggggctgctggccttccttggcctcctcttctgcctgggggtggccatgttcacctaccagagcctccagggctgccctcgaaagatggcaggagagatggcggagggccttcgctacatcccccggagctgtggtagtaattcatatgtcctggtgcccgtgtgaactcctctggcctgtgtctagttgtttgattcagacagctgcctgggatccctcatcctcatacccacccccacccaagggcctggcctgagctgggatgattggaggggggaggtgggatcctccaggtgcacaagctccaagctcccaggcattccccaggaggccagccttgaccattctccaccttccagggacagagggggtggcctcccaactcaccccagccccaaaactctcctctgctgctggctggttagaggttccctttgacgccatcccagccccaatgaacaattatttattaaatgcccagccccttctgacccatgctgccctgtgagtactacagtcctcccatctcacacatgagcatcaggccaggccctctgcccactccctgcaacctgattgtgtctcttggtcctgctgcagttgccagtcaccccggccacctgcggtgctatctcccccagccccatcctctgtacagagcccacgcccccactggtgacatgtcttttcttgcatgaggctagtgtggtgtttcctggcactgcttccagtgaggctctgcccttggttaggcattgtgggaaggggagataagggtatctggtgactttcctctttggtctacactgtgctgagtctgaaggctgggttctgatcctagttccaccatcaagccaccaacatactcccatctgtgaaaggaaagagggaggtaaggaatacctgtccccctgacaacactcattgacctgaggcccttctctccagcccctggatgcagcctcacagtccttaccagcagagcaccttagacagtccctgccaatggactaacttgtctttggaccctgaggcccagagggcctgcaagggagtgagttgatagcacagaccctgccctgtgggcccccaaatggaaatgggcagagcagagaccatccctgaaggccccgcccaggcttagtcactgagacagcccgggctctgcctcccatcacccgctaagagggagggagggctccagacacatgtccaagaagcccaggaaaggctccaggagcagccacattcctgatgcttcttcagagactcctgcaggcagccaggccacaagacccttgtggtcccaccccacacacgccagattctttcctgaggctgggctcccttcccacctctctcactccttgaaaacactgttctctgccctccaagaccttctccttcacctttgtccccaccgcagacaggaccagggatttccatgatgttttccatgagtcccctgtttgtttctgaaagggacgctacccgggaagggggctgggacatgggaaaggggaagttgtaggcataaagtcaggggttcccttttttggctgctgaaggctcgagcatgcctggatggggctgcaccggctggcctggcccctcagggtccctggtggcagctcacctctcccttggattgtccccgacccttgccgtctacctgaggggcctcttatgggctgggttctacccaggtgctaggaacactccttcacagatgggtgcttggaggaaggaaacccagctctggtccatagagagcaagacgctgtgctgccctgcccacctggcctctgcactcccctgctgggtgtggcgcagcatattcaggaagctcagggcctggctcaggtggggtcactctggcagctcagagagggtgggagtgggtccaatgcactttgttctggctcttccaggctgggagagcctttcaggggtgggacaccctgtgatggggccctgcctcctttgtgaggaagccgctggggccagttggtcccccttccatggactttgttagtttctccaagcaggacatggacaaggatgatctaggaagactttggaaagagtaggaagactttggaaagacttttccaaccctcatcaccaacgtctgtgccattttgtattttactaataaaatttaaaagtcttgtgaaaaaaaaaaaaaaa

SEQ ID NO: 104 - DNA, 2131 bp, Homo sapiens
  misc_feature: Incyte ID No: 331192.11
gcttcagggtacagctcccccgcagccagaagccgggcctgcagcccctcagcaccgctccgggacaccccacccgcttcccaggcgtgacctgtcaacagcaacttcgcggtgtggtgaactctctgaggaaaaaccattttgattattactctcagacgtgcgtggcaacaagtgactgagacctagaaatccaagcgttggaggtcctgaggccagcctaagtcgcttcaaaatggaacgaaggcgtttgtggggttccattcagagccgatacatcagcatgagtgtgtggacaagcccacggagacttgtggagctggcagggcagagcctgctgaaggatgaggccctggccattgccgccctggagttgctgcccagggagctcttcccgccactcttcatggcagcctttgacgggagacacagccagaccctgaaggcaatggtgcaggcctggcccttcacctgcctccctctgggagtgctgatgaagggacaacatcttcacctggagaccttcaaagctgtgcttgatggacttgatgtgctccttgcccaggaggttcgccccaggaggtggaaacttcaagtgctggatttacggaagaactctcatcaggacttctggactgtatggtctggaaacagggccagtctgtactcatttccagagccagaagcagctcagcccatgacaaagaagcgaaaagtagatggtttgagcacagaggcagagcagcccttcattccagtagaggtgctcgtagacctgttcctcaaggaaggtgcctgtgatgaattgttctcctacctcattgagaaagtgaagcgaaagaaaaatgtactacgcctgtgctgtaagaagctgaagatttttgcaatgcccatgcaggatatcaagatgatcctgaaaatggtgcagctggactctattgaagatttggaagtgacttgtacctggaagctacccaccttggcgaaattttctccttacctgggccagatgattaatctgcgtagactcctcctctcccacatccatgcatcttcctacatttccccggagaaggaagagcagtatatcgcccagttcacctctcagttcctcagtctgcagtgcctgcaggctctctatgtggactctttatttttccttagaggccgcctggatcagttgctcaggcacgtgatgaaccccttggaaaccctctcaataactaactgccggctttcggaaggggatgtgatgcatctgtcccagagtcccagcgtcagtcagctaagtgtcctgagtctaagtggggtcatgctgaccgatgtaagtcccgagcccctccaagctctgctggagagagcctctgccaccctccagggacctggtctttgatgagtgtgggatcacggatgatcagctccttgccctcctgccttccctgagccactgctcccagcttacgaccttaagcttctacgggaattccatctccatatctgccctgcagagtctcctgcagcacctcatcgggctgagcaatctgacccacgtgctgtatcctgtccccctggagagttatgaggacatccatggtaccctccacctggagaggcttgcctatctgcatgccaggctcagggagttgctgtgtgagttggggcggcccagcatggtctggcttagtgccaacccctgtcctcactgtggggacagaaccttctatgacccggagcccatcctgtgcccctgtttcatgcctaattagctgggtgcacatatcaaatgcttcattctgcatacttggacactaaagccaggatgtgcatgcatcttgaagcaacaaagcagccacagtttcagacaaatgttcagtgtgagtgaggaaaacatgttcagtgaggaaaaaacattcagacaaatgttcagtgaggaaaaaaaggggaagttgggggtaggcagatgttgacttgaggagttaatgtgatctttggggagatacatcttatagagttagaaatagaatctgaatttctaaagggagattctggcttgggaagtacatgtaggagttaatccctgtgtagactgttgtaaagaaactgttgaaaataaagagaagcaatgtgaagc

SEQ ID NO: 105 - DNA, 10942 bp, Homo sapiens
  misc_feature: Incyte ID No: 344053.5
gcgggctcaggcccgggcagctgcggaccgaggttggctcgatgctgttcccaggtccaagggtagccaaggatggctgcagcttcatatgatcagttgttaaagcaagttgaggcactgaagatggagaactcaaatcttcgacaagagctagaagataattccaatcatcttacaaaactggaaactgaggcatctaatatgaaggaagtacttaaacaactacaaggaagtattgaagatgaagctatggcttcttctggacagattgatttattagagcgtcttaaagagcttaacttagatagcagtaatttccctggagtaaaactgcggtcaaaaatgtccctccgttcttatggaagccgggaaggatctgtatcaagccgttctggagagtgcagtcctgttcctatgggttcatttccaagaagagggtttgtaaatggaagcagagaaagtactggatatttagaagaacttgagaaagagaggtcattgcttcttgctgatcttgacaaagaagaaaaggaaaaagactggtattacgctcaacttcagaatctcactaaaagaatagatagtcttcctttaactgaaaatttttccttacaaacagatatgaccagaaggcaattggaatatgaagcaaggcaaatcagagttgcgatggaagaacaactaggtacctgccaggatatggaaaaacgagcacagcgaagaatagccagaattcagcaaatcgaaaaggacatacttcgtatacgacagcttttacagtcccaagcaacagaagcagagaggtcatctcagaacaagcatgaaaccggctcacatgatgctgagcggcagaatgaaggtcaaggagtgggagaaatcaacatggcaacttctggtaatggtcagggttcaactacacgaatggaccatgaaacagccagtgttttgagttctagtagcacacactctgcacctcgaaggctgacaagtcatctgggaaccaaggtggaaatggtgtattcattgttgtcaatgcttggtactcatgataaggatgatatgtcgcgaactttgctagctatgtctagctcccaagacagctgtatatccatgcgacagtctggatgtcttcctctcctcatccagcttttacatggcaatgacaaagactctgtattgttgggaaattcccggggcagtaaagaggctcgggccagggccagtgcagcactccacaacatcattcactcacagcctgatgacaagagaggcaggcgtgaaatccgagtccttcatcttttggaacagatacgcgcttactgtgaaacctgttgggagtggcaggaagctcatgaaccaggcatggaccaggacaaaaatccaatgccagctcctgttgaacatcagatctgtcctgctgtgtgtgttctaatgaaactttcatttgatgaagagcatagacatgcaatgaatgaactagggggactacaggccattgcagaattattgcaagtggactgtgaaatgtacgggcttactaatgaccactacagtattacactaagacgatatgctggaatggctttgacaaacttgacttttggagatgtagccaacaaggctacgctatgctctatgaaaggctgcatgagagcacttgtggcccaactaaaatctgaaagtgaagacttacagcaggttattgcaagtgttttgaggaatttgtcttggcgagcagatgtaaatagtaaaaagacgttgcgagaagttggaagtgtgaaagcattgatggaatgtgctttagaagttaaaaaggaatcaaccctcaaaagcgtattgagtgccttatggaatttgtcagcacattgcactgagaataaagctgatatatgtgctgtagatggtgcacttgcatttttggttggcactcttacttaccggagccagacaaacactttagccattattgaaagtggaggtgggatattacggaatgtgtccagcttgatagctacaaatgaggaccacaggcaaatcctaagagagaacaactgtctacaaactttattacaacacttaaaatctcatagtttgacaatagtcagtaatgcatgtggaactttgtggaatctctcagcaagaaatcctaaagaccaggaagcattatgggacatgggggcagttagcatgctcaagaacctcattcattcaaagcacaaaatgattgctatgggaagtgctgcagctttaaggaatctcatggcaaataggcctgcgaagtacaaggatgccaatattatgtctcctggctcaagcttgccatctcttcatgttaggaaacaaaaagccctagaagcagaattagatgctcagcacttatcagaaacttttgacaatatagacaatttaagtcccaaggcatctcatcgtagtaagcagagacacaagcaaagtctctatggtgattatgtttttgacaccaatcgacatgatgataataggtcagacaattttaatactggcaacatgactgtcctttcaccatatttgaatactacagtgttacccagctcctcttcatcaagaggaagcttagatagttctcgttctgaaaaagatagaagtttggagagagaacgcggaattggtctaggcaactaccatccagcaacagaaaatccaggaacttcttcaaagcgaggtttgcagatctccaccactgcagcccagattgccaaagtcatggaagaagtgtcagccattcatacctctcaggaagacagaagttctgggtctaccactgaattacattgtgtgacagatgagagaaatgcacttagaagaagctctgctgcccatacacattcaaacacttacaatttcactaagtcggaaaattcaaataggacatgttctatgccttatgccaaattagaatacaagagatcttcaaatgatagtttaaatagtgtcagtagtagtgatggttatggtaaaagaggtcaaatgaaaccctcgattgaatcctattctgaagatgatgaaagtaagttttgcagttatggtcaatacccagccgacctagcccataaaatacatagtgcaaatcatatggatgataatgatggagaactagatacaccaataaattatagtcttaaatattcagatgagcagttgaactctggaaggcaaagtccttcacagaatgaaagatgggcaagacccaaacacataatagaagatgaaataaaacaaagtgagcaaagacaatcaaggaatcaaagtacaacttatcctgtttatactgagagcactgatgataaacacctcaagttccaaccacattttggacagcaggaatgtgtttctccatacaggtcacggggagccaatggttcagaaacaaatcgagtgggttctaatcatggaattaatcaaaatgtaagccagtctttgtgtcaagaagatgactatgaagatgataagcctaccaattatagtgaacgttactctgaagaagaacagcatgaagaagaagagagaccaacaaattatagcataaaatataatgaagagaaacgtcatgtggatcagcctattgattatagtttaaaatatgccacagatattccttcatcacagaaacagtcattttcattctcaaagagttcatctggacaaagcagtaaaaccgaacatatgtcttcaagcagtgagaatacgtccacaccttcatctaatgccaagaggcagaatcagctccatccaagttctgcacagagtagaagtggtcagcctcaaaaggctgccacttgcaaagtttcttctattaaccaagaaacaatacagacttattgtgtagaagatactccaatatgtttttcaagatgtagttcattatcatctttgtcatcagctgaagatgaaataggatgtaatcagacgacacaggaagcagattctgctaataccctgcaaatagcagaaataaaagaaaagattggaactaggtcagctgaagatcctgtgagcgaagttccagcagtgtcacagcaccctagaaccaaatccagcagactgcagggttctagtttatcttcagaatcagccaggcacaaagctgttgaattttcttcaggagcgaaatctccctccaaaagtggtgctcagacacccaaaagtccacctgaacactatgttcaggagaccccactcatgtttagcagatgtacttctgtcagttcacttgatagttttgagagtcgttcgattgccagctccgttcagagtgaaccatgcagtggaatggtaagtggcattataagccccagtgatcttccagatagccctggacaaaccatgccaccaagcagaagtaaaacacctccaccacctcctcaaacagctcaaaccaagcgagaagtacctaaaaataaagcacctactgctgaaaagagagagagtggacctaagcaagctgcagtaaatgctgcagttcagagggtccaggttcttccagatgctgatactttattacattttgccacggaaagtactccagatggattttcttgttcatccagcctgagtgctctgagcctcgatgagccatttatacagaaagatgtggaattaagaataatgcctccagttcaggaaaatgacaatgggaatgaaacagaatcagagcagcctaaagaatcaaatgaaaaccaagagaaagaggcagaaaaaactattgattctgaaaaggacctattagatgattcagatgatgatgatattgaaatactagaagaatgtattatttctgccatgccaacaaagtcatcacgtaaagcaaaaaagccagcccagactgcttcaaaattacctccacctgtggcaaggaaaccaagtcagctgcctgtgtacaaacttctaccatcacaaaacaggttgcaaccccaaaagcatgttagttttacaccgggggatgatatgccacgggtgtattgtgttgaagggacacctataaacttttccacagctacatctctaagtgatctaacaatcgaatcccctccaaatgagttagctgctggagaaggagttagaggaggagcacagtcaggtgaatttgaaaaacgagataccattcctacagaaggcagaagtacagatgaggctcaaggaggaaaaacctcatctgtaaccatacctgaattggatgacaataaagcagaggaaggtgatattcttgcagaatgcattaattctgctatgcccaaagggaaaagtcacaagcctttccgtgtgaaaaagataatggaccaggtccagcaagcatctgcgtcgtcttctgcacccaacaaaaatcagttagatggtaagaaaaagaaaccaacttcaccagtaaaacctataccacaaaatactgaatataggacacgtgtaagaaaaaatgcagactcaaaaaataatttaaatgctgagagagttttctcagacaacaaagattcaaagaaacagaatttgaaaaataattccaaggacttcaatgataagctcccaaataatgaagatagagtcagaggaagttttgcttttgattcacctcatcattacacgcctattgaaggaactccttactgtttttcacgaaatgattctttgagttctctagattttgatgatgatgatgttgacctttccagggaaaaggctgaattaagaaaggcaaaagaaaataaggaatcagaggctaaagttaccagccacacagaactaacctccaaccaacaatcagctaataagacacaagctattgcaaagcagccaataaatcgaggtcagcctaaacccatacttcagaaacaatccacttttccccagtcatccaaagacataccagacagaggggcagcaactgatgaaaagttacagaattttgctattgaaaatactccagtttgcttttctcataattcctctctgagttctctcagtgacattgaccaagaaaacaacaataaagaaaatgaacctatcaaagagactgagccccctgactcacagggagaaccaagtaaacctcaagcatcaggctatgctcctaaatcatttcatgttgaagataccccagtttgtttctcaagaaacagttctctcagttctcttagtattgactctgaagatgacctgttgcaggaatgtataagctccgcaatgccaaaaaaaaaaaagccttcaagactcaagggtgataatgaaaaacatagtcccagaaatatgggtggcatattaggtgaagatctgacacttgatttgaaagatatacagagaccagattcagaacatggtctatcccctgattcagaaaattttgattggaaagctattcaggaaggtgcaaattccatagtaagtagtttacatcaagctgctgctgctgcatgtttatctagacaagcttcgtctgattcagattccatcctttccctgaaatcaggaatctctctgggatcaccatttcatcttacacctgatcaagaagaaaaaccctttacaagtaataaaggcccacgaattctaaaaccaggggagaaaagtacattggaaactaaaaagatagaatctgaaagtaaaggaatcaaaggaggaaaaaaagtttataaaagtttgattactggaaaagttcgatctaattcagaaatttcaggccaaatgaaacagccccttcaagcaaacatgccttcaatctctcgaggcaggacaatgattcatattccaggagttcgaaatagctcctcaagtacaagtcctgtttctaaaaaaggcccaccccttaagactccagcctccaaaagccctagtgaaggtcaaacagccaccacttctcctagaggagccaagccatctgtgaaatcagaattaagccctgttgccaggcagacatcccaaataggtgggtcaagtaaagcaccttctagatcaggatctagagattcgaccccttcaagacctgcccagcaaccattaagtagacctatacagtctcctggccgaaactcaatttcccctggtagaaatggaataagtcctcctaacaaattatctcaacttccaaggacatcatcccctagtactgcttcaactaagtcctcaggttctggaaaaatgtcatatacatctccaggtagacagatgagccaacagaaccttaccaaacaaacaggtttatccaagaatgccagtagtattccaagaagtgagtctgcctccaaaggactaaatcagatgaataatggtaatggagccaataaaaaggtagaactttctagaatgtcttcaactaaatcaagtggaagtgaatctgatagatcagaaagacctgtattagtacgccagtcaactttcatcaaagaagctccaagcccaaccttaagaagaaaattggaggaatctgcttcatttgaatctctttctccatcatctagaccagcttctcccactaggtcccaggcacaaactccagttttaagtccttcccttcctgatatgtctctatccacacattcgtctgttcaggctggtggatggcgaaaactcccacctaatctcagtcccactatagagtataatgatggaagaccagcaaagcgccatgatattgcacggtctcattctgaaagtccttctagacttccaatcaataggtcaggaacctggaaacgtgagcacagcaaacattcatcatcccttcctcgagtaagcacttggagaagaactggaagttcatcttcaattctttctgcttcatcagaatccagtgaaaaagcaaaaagtgaggatgaaaaacatgtgaactctatttcaggaaccaaacaaagtaaagaaaaccaagtatccgcaaaaggaacatggagaaaaataaaagaaaatgaattttctcccacaaatagtacttctcagaccgtttcctcaggtgctacaaatggtgctgaatcaaagactctaatttatcaaatggcacctgctgtttctaaaacagaggatgtttgggtgagaattgaggactgtcccattaacaatcctagatctggaagatctcccacaggtaatactcccccggtgattgacagtgtttcagaaaaggcaaatccaaacattaaagattcaaaagataatcaggcaaaacaaaatgtgggtaatggcagtgttcccatgcgtaccgtgggtttggaaaatcgcctgaactcctttattcaggtggatgcccctgaccaaaaaggaactgagataaaaccaggacaaaataatcctgtccctgtatcagagactaatgaaagttctatagtggaacgtaccccattcagttctagcagctcaagcaaacacagttcacctagtgggactgttgctgccagagtgactccttttaattacaacccaagccctaggaaaagcagcgcagatagcacttcagctcggccatctcagatcccaactccagtgaataacaacacaaagaagcgagattccaaaactgacagcacagaatccagtggaacccaaagtcctaagcgccattctgggtcttaccttgtgacatctgtttaaaagagaggaagaatgaaactaagaaaattctatgttaattacaactgctatatagacattttgtttcaaatgaaactttaaaagactgaaaaattttgtaaataggtttgattcttgttagagggtttttgttctggaagccatatttgatagtatactttgtcttcactggtcttattttgggaggcactcttgatggttaggaaaaaaatagtaaagccaagtatgtttgtacagtatgttttacatgtatttaaagtagcatcccatcccaacttcctttaattattgcttgtcttaaaataatgaacactacagatagaaaatatgatatattgctgttatcaatcatttctagattataaactgactaaacttacatcagggaaaaattggtatttatgcaaaaaaaaatgtttttgtccttgtgagtccatctaacatcataattaatcatgtggctgtgaaattcacagtaatatggttcccgatgaacaagtttacccagcctgctttgctttactgcatgaatgaaactgatggttcaatttcagaagtaatgattaacagttatgtggtcacatgatgtgcatagagatagctacagtgtaataatttacactattttgtgctccaaacaaaacaaaaatctgtgtaactgtaaaacattgaatgaaactattttacctgaactagattttatctgaaagtaggtagaatttttgctatgctgtaatttgttgtatattctggtatttgaggtgagatggctgctcttttattaatgagacatgaattgtgtctcaacagaaactaaatgaacatttcagaataaattattgctgtatgtaaactgttactgaaattggtatttgtttgaagggtcttgtttcacatttgtattaataattgtttaaaatgcctcttttaaaagcttatataaatttttttcttcagcttctatgcattaagagtaaaattcctcttactgtaataaaaacaattgaagaagactgttgccacttaaccattccatgcgttggcacttatctattcctgaaatttcttttatgtgattagctcatcttgatttttaacatttttccacttaaacttttttttcttactccactggagctcagtaaaagtaaattcatgtaatagcaatgcaagcagcctagcacagactaagcattgagcataataggcccacataatttcctctttcttaatattatagaattctgtacttgaaattgattcttagacattgcagtctcttcgaggctttacagtgtaaactgtcttgccccttcatcttcttgttgcaactgggtctgacatgaacactttttatcaccctgtatgttagggcaagatctcagcagtgaagtataatcagcactttgccatgctcagaaaattcaaatcacatggaactttagaggtagatttaatacgattaagatattcagaagtatattttagaatccctgcctgttaaggaaactttatttgtggtaggtacagttctggggtacatgttaagtgtccccttatacagtggagggaagtcttccttcctgaaggaaaataaactgacacttattaactaagataatttacttaatatatcttccctgatttgttttaaaagatcagagggtgactgatgatacatgcatacatatttgttgaataaatgaaaatttatttttagtgataagattcatacactctgtatttggggagagaaaacctttttaagcatggtggggcactcagataggagtgaatacacctacctggtgccttgaaaatcacatcaagtagttaattatctaccccttacctgtgtttataacttccaggtaatgagaatgattttttttaaagctaaaatgccagtaaataaaagtgctatgacttgagctaagatatttgactccaatgcctgtactgtgtctactgcaccactttgtaaacacttcaatttactatctttgaaatgattgacctttaaatttttgccaaatgttatctgaaattgtctatgaataccatctacttctgttgttttcccaggcttccataaacaatggagatacatgcatataggtcatactggtttcctttcattttttgattttctatttctaattttctgaattactgcatgccagttgttgcaaaccacttcaagtacttctatggaaagagatggatgttagtcaattagataaacttgccttttaattcaaataaggaagaaaatataaatgctgaaaatgaacattccacatgccagaaaagtggaatttttgtaggcaacacttga

SEQ ID NO: 106 - DNA, 4144 bp, Homo sapiens
  misc_feature: Incyte ID No: 411188.2
ggactgtaggagagggaggcagcccgtcctcctcacgaacctgcaaggatgcggcaggggcctgggggcatggggaggtactaaccccccggagcccccgattggggcttgcagacctggcccgtgggcggattttctgcctagcgcagccgagaagcagaggtgccaggaaaaccaagagaggggcgctgggggtgcccatccccagagtcggtccctctgcgaaccgaggaagaaaagaggagggagtcagcgagtggtcagaagggaaaacctgacaccagactggctccggagcgtccgggagactggggcgctccgcgccatcgtcttcaatgcttctctgaacagcctttaggaagagtgcgagagaaagagagagagcgcggcgccagggagaggagaaaagaagatgaggattatttccagacagattgtcttgttattttctggattttggggactcgccatgggagcctttccgagcagcgtgcaaataggtggtctcttcatccgaaacacagatcaggaatacactgcttttcgattagcaatttttcttcataacaccagccccaatgcgtcggaagctccttttaatttggtacctcatgtggacaacattgagacagccaacagttttgctgtaacaaacgccttctgttcccagtattctagaggagtatttgccatttttggactctatgataagaggtcggtacataccttgacctcattctgcagcgccttacatatctccctcatcacaccaagtttccctactgagggggagagccagtttgtgctgcaactaagaccttcgttacgaggagcactcttgagtttgctggatcactacgaatggaactgttttgtcttcctgtatgacacagacaggggatactcgatactccaagctattatggaaaaagcaggacaaaatggttggcatgtcagcgctatatgtgtggaaaattttaatgatgtcagctataggcaacttctagaagaacttgacagaagacaagagaagaagtttgtaatagactgtgagatagagagacttcaaaacatattagaacagattgtaagtgttggaaagcatgttaaaggctaccattatatcattgcaaacttgggattcaaggatatttctcttgagaggtttatacatggtggagccaatgttactggattccagttggtggattttaatacacccatggtaaccaaactaatggatcgctggaagaaactagatcagagagagtatccaggatctgagactcctccaaagtacacctctgctctgacttatgatggagtccttgtgatggctgaaactttccgaagtcttaggaggcagaaaattgatatctcaaggagaggaaatgctggggattgtctggcaaatcctgctgctccatggggccagggaattgacatggagaggacactcaaacaggttcgaattcaagggctgacagggaatgttcagtttgaccactatggacgtagagtcaattacacaatggatgtgtttgagctgaaaagcacaggacctagaaaggttggttactggaatgatatggataagttagtcttgattcaagatgtaccaactcttggcaatgacacagctgctattgagaacagaacagtggttgtaaccacaattatggaatccccatatgttatgtacaagaaaaatcatgaaatgtttgaaggaaatgacaagtatgaaggatactgtgtagatttggcatctgaaattgcaaaacatattggtatcaagtataaaattgccattgtccctgatggaaaatatggagcaagggatgcagacacaaaaatctggaatgggatggtaggagaacttgtttatgggaaagcagagattgctattgcccctctgacaatcactttggtacgagaggaggtcattgacttttctaagcccttcatgagtttgggcatatctatcatgatcaaaaagcctcagaaatccaaaccaggagtgttttccttcttggatcctctggcctatgagatttggatgtgcatagtctttgcctacattggtgtcagcgtggtcttattcctagttagtagatttagtccatatgagtggcacacagaagagccagaggacggaaaggaaggacccagcgaccagcctcccaatgagtttggcatctttaacagcctctggttttccctgggtgcttttatgcagcaaggatgtgacatttcacccagatccctctcaggtcgaattgttggaggtgtttggtggttctttacactcatcattatatcatcttatactgctaacctggctgctttcctgacggttgagcgaatggtctctcccatagaaagtgcagaagacctggccaaacaaacagaaattgcctatggaacactggattcaggatcaacaaaagaattcttcagaagatcaaaaatagcagtgtatgaaaagatgtggacctacatgcgatcagcagagccatcagtattcactaggactacagctgagggagtagctcgtgtccgcaaatccaagggcaaatttgcctttctcctggagtccactatgaatgaatacattgagcagcgaaagccatgtgacacgatgaaagtgggaggaaatctggattccaaaggctatggagtagcaacgcccaagggttcctcattaggaactcctgtaaaccttgccgttttgaaactcagtgaggcaggcgtcttagacaagctgaaaaacaaatggtggtacgataaaggtgaatgtggacccaaagactctggaagcaaggacaagacgagtgccttgagcctgagcaatgtagcaggcgtcttctacattctggttggcggcttgggcttggcaatgctggtggctttgatagagttctgttacaagtccagggcagaagcgaagagaatgaagctgaccttttctgaagccataagaaacaaagccagattatccatcactgggagtgtgggagagaatggccgcgtcttgacgcctgactgcccaaaggctgtacacactggaactgcaatcagacaaagttcaggattggctgtcattgcatcggacctaccataaaaaccaaaaaaataattgagtgccttaattaaactgttggtgactggtggaaacgcagccctgagggacacgccacgcgcgggtctttgctaaaccaatcctttgggctgagagcgggaagtccgtcctaacgcgctggccggacatcagcagcagcaacgtgtgcatgagctcagctcggaaacccaaactcagattttatatcaggaaaactcacaattgaggtttttttcggggagtgggtgggggagggatctgggatgggtgtattaacagcaacaaatttcattcgagtggactcaaaaactaatcagacttatgagttagcgcattaaactgtgaagttcttgctcagaaaggcctttgtcttcaccggaaaggataaaatagttgtagaagtccgtgaacatgctaacctgtgtctccagaacatccatatagtccatggaagaaaatccagctgagaaaacaaatcactaaactgtgataagaaaataatgaacaaacatgtaaaacctgtgggaaaaaaaaaataaaggaagtatgtacacttactttggagaaaacaaatactgaaacatgcttgctttttaactgacgtaaattcagtagaggacaacacaattcttttttctaaccatcttagggaacaatacattgcaataattgatataaatgccatcactgtaataaactttagagacttttttttataaaagttgttggtcatcttcttgtttgctgtaaccttcactatgtcacatgagtcgattcaccgattgcatttgtctcacaaccaggaagaaaagcaaaaggaagaaaacgtttaggttcaatcatcagtctgcggtgtagactcgaaagagatgacaggtcactcatgttaatggtattatttataatctcattctgtgtacaacattgtggtttttgtacccaccaaaaagaataaaacagcagatgttcttacaatatctacagagcttaaaagttttttcttatcgttataaaagttatttgaga

SEQ ID NO: 107 - DNA, 6059 bp, Homo sapiens
  misc_feature: Incyte ID No: 331510.4
  unsure 5635, 5647, 5765: a, t, c, g, or other
gtttatttggattctcagggtagtcgattttgccacctcttggctatcagctgccttggagattggtttcatagtaaggattctttctttaaggtgatatggagcaactgctttcacaggggcaccagcccctttgcttttactctgtccaaagttaacatgtcactgaaaaacgagccacgggtaaatacctctgcactgcagaaaattgctgctgacatgagtaatatcatagaaaatctggacacgcgggaactccactttgagggagaggaggtagactacgacgtgtctcccagcgatcccaagatacaagaagtgtatatccctttctctgctatttataacactcaaggatttaaggagcctaatatacagacgtatctctccggctgtccaataaaagcacaagttctggaagtggaacgcttcacatctacaacaagggtaccaagtattaatctttacactattgaattaacacatggggaatttaaatggcaagttaagaggaaattcaagcattttcaagaatttcacagagagctgctcaagtacaaagcctttatccgcatccccattcccactagaagacacacgtttaggaggcaaaacgtcagagaggagcctcgagagatgcccagtttgccccgttcatctgaaaacatgataagagaagaacaattccttggtagaagaaaacaactggaagattacttgacaaagatactaaaaatgcccatgtatagaaactatcatgccacaacagagtttcttgatataagccagctgtctttcatccatgatttgggaccaaagggcatagaaggtatgataatgaaaagatctggaggacacagaataccaggcttgaattgctgtggtcagggaagagcctgctacagatggtcaaaaagatggttaatagtgaaagattcctttttattgtatatgaaaccagacagcggtgccattgccttcgtcctgctggtagacaaagaattcaaaattaaggtggggaagaaggagacagaaacgaaatatggaatccgaattgataatctttcaaggacacttattttaaaatgcaacagctatagacatgctcggtggtggggaggggctatagaagaattcatccagaaacatggcaccaactttctcaaagatcatcgatttgggtcatatgctgctatccaagagaatgctttagctaaatggtatgttaatgccaaaggatattttgaagatgtggcaaatgcaatggaagaggcaaatgaagagatttttatcacagactggtggctgagtccagaaatcttcctgaaacgcccagtggttgagggaaatcgttggaggttggactgcattcttaaacgaaaagcacaacaaggagtgaggatcttcataatgctctacaaagaggtggaactcgctcttggcatcaatagtgaatacaccaagaggactttgatgcgtctacatcccaacataaaggtgatgagacacccggatcatgtgtcatccaccgtctatttgtgggctcaccatgagaagcttgtcatcattgaccaatcggtggcctttgtgggagggattgacctggcctatggaaggtgggacgacaatgagcacagactcacagacgtgggcagtgtgaagcgggtcacttcaggaccgtctctgggttccctcccacctgccgcaatggagtctatggaatccttaagactcaaagataaaaatgagcctgttcaaaacctacccatccagaagagtattgatgatgtggattcaaaactgaaaggaataggaaagccaagaaagttctccaaatttagtctctacaagcagctccacaggcaccacctgcacgacgcagatagcatcagcagcattgacagcacctccagttattttaatcactatagaagtcatcacaatttaatccatggtttaaaaccccacttcaaactctttcacccgtccagtgagtctgagcaaggactcactagacctcatgctgataccgggtccatccgtagtttacagacaggtgtgggagagctgcatggggaaaccagattctggcatggaaaggactactgcaatttcgtcttcaaagactgggttcaacttgataaaccttttgctgatttcattgacaggtactccacgccccggatgccctggcatgacattgcctctgcagtccacgggaaggcggctcgtgatgtggcacgtcacttcatccagcgctggaacttcacaaaaattatgaaatcaaaatatcggtccctttcttatccttttctgcttccaaagtctcaaacaacagcccatgagttgagatatcaagtgcctgggtctgtccatgctaacgtacagttgctccgctctgctgctgattggtctgctggtataaagtaccatgaagagtccatccacgccgcttacgtccatgtgatagagaacagcaggcactatatctatatcgaaaaccagtttttcataagctgtgctgatgacaaagttgtgttcaacaagataggcgatgccattgcccagaggatcctgaaagctcacagggaaaaccagaaataccgggtatatgtcgtgataccacttctgccagggttcgaaggagacatttcaaccggcggaggaaatgctctacaggcaatcatgcacttcaactacagaaccatgtgcagaggagaaaattccatccttggacagttaaaagcagagcttggtaatcagtggataaattacatatcattctgtggtcttagaacacatgcagagctcgaaggaaacctagtcactgagcttatctatgtccacagcaagttgttaattgctgatgataacactgttattattggctctaccaacataaatgaccgcagcatgctggggaaagcgtgacagtgaaatggctgtcattgtgcaagatacagagactgttccttcagtaatggatggaaaagagtaccaagctggccggtttgcccgaggacttcggctacagtgctttagggttgtccttggctatcttgatgacccaagtgaggacattcaggatccagtgagtgacaaattcttcaaggaggtgtgggtttcaacagcagctcgaaatgctacaatttatgacaaggttttccggtgccttcccaatgatgaagtacacaatttaattcagctgagagactttataaacaagcccgtattagctaaggaagatcccattcgagctgaggaggaactgaagaagatccgtggatttttggtgcaattccccttttatttcttgtctgaagaaagcctactgccttctgttgggaccaaagaggccatagtgcccatggaggtttggacttaagagatattcattggcagctcaaagacttccaccctggagaccacactgcacacagtgacttcctggggatgtcatagccaaagccaggcctgacgcattctcgtatccaacccaaggaccttttggaatgactggggagggctgcagtcacattgatgtaaggactgtaaacatcagcaagactttataattccttctgcctaacttgtaaaaagggggctgcattcttgttggtagcatgtactctgttgagtaaaacacatattcaaattccgtataccaaaatccatttcctttgtaacaagaatttaccagtaactgtgatctaggttgccaaaagttgtctgaatctccttattcttctctgatcttcatttatgcagccaatgtctagctggacctgccctcatcttgcagttcatacaggcactgtttgagagattgtttattattagatgttgtaatgctgcttcaagattcttcatggttacatgggatgcccctgctcatctggtcctgaagtagtaacattcacccaaatgaggatatagtcattattccttttcagtcactgtacgaacacggcagactttagcctacacagtagactgtgttaggcacttctggtaacattgacactgtatcttgacaccactaagcaacaggaaggaataaattccaatattgagacagagatttatttcattttgctcccaaaggcactgacaacatgagtccttgtgattaggcccacctgatcaaatgtaaaaacatgcatgggatatttgattacgtaacaaccagctaaaactgagagcacacagccttcggaaacccccaaggtgtcgaggaggatcagatccagataagagaagatgattccttctagtcctgtaaaatttcctgtcatccttagctgctgggttgattgaaatttgatctctacatttcaaaatcaaactagtgaatacagtttgtctttcaagagaatcagaggcatcgtaactcctaccaagttagtaagtatgagtctaaccttgtttgacattcaggtcttctgctacattatcttctttgagaaaaattaattgattataaaatatgtgctacttcacttacattattaaatatgtattaacgcctctcaccagggcttccagtgaagttacaatgccctagtctgtgaattagtctaaaaacgtgtttttccttttcggatgttagagtaccctttgataaactaaattttactaagctgaacaactctgacagtctaaagagctaatgtgggttaccaaaaggcctgtacctgtaaaacaaaatgcaggtgtaatgattatacatgtctatggattacctggacatactctcatttgggttgttcttcaaagaagcaagcagccgatccctgttttcataaagctaatacttcagttggaaaaattaaacaggagcacaaagtcagggataggggttagcagaagagagaaatagtgtcacatcaagggcaggatctcatagctagggaacatttcacaaataaggtgagattttgtaaccaataataaaaatgaatgtttttataagtaaataacttatttttcatatggctaaagatggtaaaatgacttcattctatagccattgtaaataagaatttgctattgatgaaagaagttcagattggcatttgaagtattgagtgtatgggatctctaaggatttcttagattttatatttaaatattttttaaaccttagaggagtcaacaaactggctcttgattttcagcaccctactctcatgaaaaaagcctgaaaggaccctttcccttataagtaatttaatccaatttctccccattttatagatgaggaaactgaggctcagatcagatgagaactcacttaaatccactcaatgtgtagatggtagagctgggactagcaacattgctgcagcccattgttggcctctctcttcactttatcattgcccaagaatgaggatatgcagtaaacagaattcaggcaagatacctctaagctgttttgaaccctctgatattttgtatttatgtgtttgtctgtctccccctactagaatgtaagctccatggggcagggacttcactgtattttgttcatagtgtatccccagagcctggaccagtgcttgggcacataggagatggcaataaatgcttgtagaattaataaacaaggtgaaggagagagctaatgaaatgnaaatcttagtcncatataagaagtcttactactgctttctatggcaagttccttttctattgcatcttcccaaagacaagatgctcatctgcaaaggggtgataagatttacttggagggattttatggnaaattcagtgcaataattgcttttctttttttttttgcagtagcagtttacatagtacagcattctgcaaaaattgcatgaaatgtggacacaagatgtactgtatgacttaattacctgtcattctctgacaccattactacctactagaagttcaaataatttatctttaacattgcaatatctgataaactttttaaaatgtaaataattcaaagccttgaaaatctatcatgaatctgctcaacatttcaaagtgactattttgaaatgcctataaatgctatatacctg

SEQ ID NO: 108 - DNA, 3721 bp, Homo sapiens
  misc_feature: Incyte ID No: 492750CB1
gtgcgcgcacaaccccatagggtcaagctggctcagggtgggcccttgactgtggatcccggctcaggattggcacgagggttttcaaaatgggagcccagaggtaccgcccaggtctcggaaggtgtcagggagaactttccgtggtttcagcgtcgtcgcctggagcggcggtttagagagccgagcctgatgggcgccaaggccggctggctgcttggagcgctgcctcgaagggcctgcgtgaaggaagctaatccggagaacccaggccagagcctggaaatatggcgacctgcatcggggagaagatcgaggattttaaagttggaaatctgcttggtaaaggatcatttgctggtgtctacagagctgagtccattcacactggtttggaagttgcaatcaaaatgatagataagaaagccatgtacaaagcaggaatggtacagagagtcaaaaatgaggtgaaaatacattgccaattgaaacatccttctatcttggagctttataactattttgaagatagcaattatgtgtatctggtattagaaatgtgccataatggagaaatgaacaggtatctaaagaatagagtgaaacccttctcagaaaatgaagctcgacacttcatgcaccagatcatcacagggatgttgtatcttcattctcatggtatactacaccgggacctcacactttctaacctcctactgactcgtaatatgaacatcaagattgctgattttggcctggcaactcaactgaaaatgccacatgaaaagcactatacattatgtggaactcctaactacatttcaccagaaattgccactcgaagtgcacatggccttgaatctgatgtttggtccctgggctgtatgttttatacattacttatcgggagaccacccttcgacactgacacagtcaagaacacattaaataaagtagtattggcagattatgaaatgccaacttttttgtcaatagaggccaaggaccttattcaccagttacttcgtagaaatccagcagatcgtttaagtctgtcttcagtattggaccatccttttatgtcccgaaattcttcaacaaaaagtaaagatttaggaactgtggaagactcaattgatagtgggcatgccacaatttctactgcaattacagcttcttccagtaccagtataagtggtagtttatttgacaaaagaagacttttgattggtcagccactcccaaataaaatgactgtatttccaaagaataaaagttcaactgatttttcttcttcaggagatggaaacagtttttatactcagtggggaaatcaagaaaccagtaatagtggaaggggaagagtaattcaagatgcagaagaaaggccacattctcgataccttcgtagagcttattcctctgatagatctggcacttctaatagtcagtctcaagcaaaaacatatacaatggaacgatgtcactcagcagaaatgctttcagtgtccaaaagatcaggaggaggtgaaaatgaagagaggtactcacccacagacaacaatgccaacatttttaacttctttaaagaaaagacatccagtagttctggatcttttgaaagacctgataacaatcaagcactctccaatcatctttgtccaggaaaaactccttttccatttgcagacccgacacctcagactgaaaccgtacaacagtggtttgggaatctgcaaataaatgctcatttaagaaaaactactgaatatgacagcatcagcccaaaccgggacttccagggccatccagatttgcagaaggacacatcaaaaaatgcctggactgatacaaaagtcaaaaagaactctgatgcttctgataatgcacattctgtaaaacagcaaaataccatgaaatatatgactgcacttcacagtaaacctgagataatccaacaagaatgtgtttttggctcagatcctctttctgaacagagcaagactaggggtatggagccaccatggggttatcagaatcgtacattaagaagcattacatctccgttggttgctcacaggttaaaaccaatcagacagaaaaccaaaaaggctgtggtgagcatacttgattcagaggaggtgtgtgtggagcttgtaaaggagtatgcatctcaagaatatgtgaaagaagttcttcagatatctagtgatggaaatacgatcactatttattatccaaatggtggtagaggttttcctcttgctgatagaccaccctcacctactgacaacatcagtaggtacagctttgacaatttaccagaaaaatactggcgaaaatatcaatatgcttccaggtttgtacagcttgtaagatctaaatctcccaaaatcacttattttacaagatatgctaaatgcattttgatggagaattctcctggtgctgattttgaggtttggttttatgatggggtaaaaatacacaaaacagaagatttcattcaggtgattgaaaagacagggaagtcttacactttaaaaagtgaaagtgaagttaatagcttgaaagaggagataaaaatgtatatggaccatgctaatgagggtcatcgtatttgtttagcactggaatccataatttcagaagaggaaaggaaaactaggagtgctccctttttcccaataatcataggaagaaaacctggtagtactagttcacctaaggccttatcacctcctccttctgtggattcaaattacccaacgagagatagagcatctttcaacagaatggtcatgcatagtgctgcttctccaacacaggcaccaatccttaatccctctatggttacaaatgaaggacttggtcttacaactacagcttctggaacagacatctcttctaatagtctaaaagattgtcttcctaaatcagcacaacttttgaaatctgtttttgtgaaaaatgttggttgggctacacagttaactagtggagctgtgtgggttcagtttaatgatgggtcccagttggttgtgcaggcaggagtgtcttctatcagttatacctcaccaaatggtcaaacaactaggtatggagaaaatgaaaaattaccagactacatcaaacagaaattacagtgtctgtcttccatccttttgatgttttctaatccgactcctaattttcattgattaaaactcctttcagacatataagtttaataaataacttttttgttgactttcaagtaaagtgattttttttaatttaacataaagtcttcagaaagcctttctatgaaagaattttaacctataatgtaaaggatgtattctgagagaacaaagcagaatgaaacttgagtcacttactaaatatagtggatataaaatagaacacctgactttgctcttagaccataacccccgaacttactatgttcatatatttgtattgaacaatcttttaaaagcaaaaatgtaaatgatgtgtagtttatttgtgcttttattgttttccctgcgtctcagacatgttgagaatcatggacaaaacctgctggaattttggaatttttgaagatgtaaataatgtgtatttatgttataagtaacatatgtaaacatctatatttgttttatatttatttttgtaacaccagtgtctgatgaaacatttttgcaaatgcattttataaaaaaataaatataga

SEQ ID NO: 109 - DNA, 1419 bp, Homo sapiens
  misc_feature: Incyte ID No: 348912.4
ggacagcacagctgacagccgtgctcagaaagtttctggatcccaggctcatctccacagaggagaacacgcaggcagcagagaccatggggcccatctcagccccttcctgcagatggcgcatcccctggcaggggctcctgctcacagcctcacttttcaccttctggaacccgcccaccactgctcagctcactattgaagctgtgccatccaatgctgcagaggggaaggaggttcttctacttgtccacaatctgccccaggaccctcgtggctacaactggtacaaaggggaaacagtggatgccaaccgtcgaattataggatatgtaatatcaaatcaacagattaccccagggcctgcatacagcaatcgagagacaatataccccaatgcatccctgctgatgcggaacgtcaccagaaatgacacaggatcctacaccctacaagtcataaagctaaatcttatgagtgaagaagtaactggccagttcagcgtacatccggagactcccaagccctccatctccagcaacaactccaaccccgtggaggacaaggatgctgtggccttcacctgtgaacctgagactcagaacacaacctacctgtggtgggtaaatggtcagagtctcccggtcagtcccaggctgcagctgtccaatggcaacaggaccctcactctactcagtgtcacaaggaatgacgtaggaccctatgaatgtgaaatacagaacccagcgagtgcaaacttcagtgacccagtcaccctgaatgtcctctatggcccagatgcccccaccatttccccttcagacacctattaccatgcaggggtaaatctcaacctctcctgccatgcggcctctaatccaccctcacagtattcttggtctgtcaatggcacattccagcaatacacacaaaagctctttatccccaacatcactacaaagaacagcggatcctatgcctgccacaccactaactcagccactggccgcaacaggaccacagtcaggatgatcacagtctctgatgctgtagtacaaggaagttctcctggcctctcagctagagccactgtcagcatcatgattggagtactggccagggtggctctgatatagtagctctggtgtagtttctgcatttcaagaagactggcacgtatgatggcctttcgtcttgtcctgtttcctgcagggctgaccgccatgcttgggagagagacctgtatcccgggaatggatctcctcctcctcccaataaactcctgcttctcagcactaattcctgcaggtctcttcttccctggtctgcatgctccctgtaccccactatctcgtagatgagattattcaagacctctgctcatttgtttcccagatgagggaactatgagagcaactt

SEQ ID NO: 110 - DNA, 3149 bp, Homo sapiens
  misc_feature: Incyte ID No: 2680109CB1
gcagcgtccagtgccctgccagtagctcctagagaggcaggggttaccaactggccagcaggctgtgtccctgaagtcagatcaacgggagagaaggaagtggctaaaacattgcacaggagaagtcggcctgagtggtgcggcgctcgggacccaccagcaatgctgctcttcgtgctcacctgcctgctggcggtcttcccagccatctccacgaagagtcccatatttggtcccgaggaggtgaatagtgtggaaggtaactcagtgtccatcacgtgctactacccacccacctctgtcaaccggcacacccggaagtactggtgccggcagggagctagaggtggctgcataaccctcatctcctcggagggctacgtctccagcaaatatgcaggcagggctaacctcaccaacttcccggagaacggcacatttgtggtgaacattgcccagctgagccaggatgactccgggcgctacaagtgtggcctgggcatcaatagccgaggcctgtcctttgatgtcagcctggaggtcagccagggtcctgggctcctaaatgacactaaagtctacacagtggacctgggcagaacggtgaccatcaactgccctttcaagactgagaatgctcaaaagaggaagtccttgtacaagcagataggcctgtaccctgtgctggtcatcgactccagtggttatgtaaatcccaactatacaggaagaatacgccttgatattcagggtactggccagttactgttcagcgttgtcatcaaccaactcaggctcagcgatgctgggcagtatctctgccaggctggggatgattccaatagtaataagaagaatgctgacctccaagtgctaaagcccgagcccgagctggtttatgaagacctgaggggctcagtgaccttccactgtgccctgggccctgaggtggcaaacgtggccaaatttctgtgccgacagagcagtggggaaaactgtgacgtggtcgtcaacaccctggggaagagggccccagcctttgagggcaggatcctgctcaacccccaggacaaggatggctcattcagtgtggtgatcacaggcctgaggaaggaggatgcagggcgctacctgtgtggagcccattcggatggtcagctgcaggaaggctcgcctatccaggcctggcaactcttcgtcaatgaggagtccacgattccccgcagccccactgtggtgaagggggtggcaggaagctctgtggccgtgctctgcccctacaaccgtaaggaaagcaaaagcatcaagtactggtgtctctgggaaggggcccagaatggccgctgccccctgctggtggacagcgaggggtgggttaaggcccagtacgagggccgcctctccctgctggaggagccaggcaacggcaccttcactgtcatcctcaaccagctcaccagccgggacgccggcttctactggtgtctgaccaacggcgatactctctggaggaccaccgtggagatcaagattatcgaaggagaaccaaacctcaaggtaccagggaatgtcacggctgtgctgggagagactctcaaggtcccctgtcactttccatgcaaattctcctcgtacgagaaatactggtgcaagtggaataacacgggctgccaggccctgcccagccaagacgaaggccccagcaaggccttcgtgaactgtgacgagaacagccggcttgtctccctgaccctgaacctggtgaccagggctgatgagggctggtactggtgtggagtgaagcagggccacttctatggagagactgcagccgtctatgtggcagttgaagagaggaaggcagcggggtcccgcgatgtcagcctagcgaaggcagacgctgctcctgatgagaaggtgctagactctggttttcgggagattgagaacaaagccattcaggatcccaggctttttgcagaggaaaaggcggtggcagatacaagagatcaagccgatgggagcagagcatctgtggattccggcagctctgaggaacaaggtggaagctccagagcgctggtctccaccctggtgcccctgggcctggtgctggcagtgggagccgtggctgtgggggtggccagagcccggcacaggaagaacgtcgaccgagtttcaatcagaagctacaggacagacattagcatgtcagacttcgagaactccagggaatttggagccaatgacaacatgggagcctcttcgatcactcaggagacatccctcggaggaaaagaagagtttgttgccaccactgagagcaccacagagaccaaagaacccaagaaggcaaaaaggtcatccaaggaggaagccgagatggcctacaaagacttcctgctccagtccagcaccgtggccgccgaggcccaggacggcccccaggaagcctagacggtgtcgccgcctgctccctgcacccatgacaatcaccttcagaatcatgtcgatcctggggccctcagctcctggggaccccactccctgctctaacacctgcctaggtttttcctactgtcctcagaggcgtgctggtcccctcctcagtgacatcaaagcctggcctaattgttcctattggggatgagggtggcatgaggaggtcccacttgcaacttctttctgttgagagaacctcaggtacggagaagaatagaggtcctcatgggtcccttgaaggaagagggaccagggtgggagagctgattgcagaaaggagagacgtgcagcgcccctctgcacccttatcatgggatgtcaacagaatttttccctccactccatccctccctcccgtccttcccctcttcttctttccttccatcaaaagatgtatttgaattcatactagaattcaggtgctttgctagatgctgtgacaggtatgcctacaacactgctcacagcctttctgaggacaccagtgaaagaagctacagctcttcttggcgtatttatactcactgagtcttaacttttcaccaggggtgctcacgtctgcccctagtgggagaggtcataaaatgtctcgagtcctaaggacttaggggtcatgtatgatgagcatacacacaggtaattataaa

SEQ ID NO: 111 - DNA, 1989 bp, Homo sapiens
  misc_feature: Incyte ID No: 512261CB1
ttcttcagagcacgggctggaactggcaggcaccgcgagcccctagcacccgacaagctgagtgtgcaggacgagtccccaccacacccacaccacagccgctgaatgaggcttccaggcgtccgctcgcggcccgcagagccccgccgtgggtccgcctgctgaggcgcccccagccagtgcgcttacctgccagactgcgcgccatggggcaacccgggaacggcagcgccttcttgctggcacccaatagaagccatgcgccggaccacgacgtcacgcagcaaagggacgaggtgtgggtggtgggcatgggcatcgtcatgtctctcatcgtcctggccatcgtgtttggcaatgtgctggtcatcacagccattgccaagttcgagcgtctgcagacggtcaccaactacttcatcacttcactggcctgtgctgatctggtcatgggcctggcagtggtgccctttggggccgcccatattcttatgaaaatgtggacttttggcaacttctggtgcgagttttggacttccattgatgtgctgtgcgtcacggccagcattgagaccctgtgcgtgatcgcagtggatcgctactttgccattacttcacctttcaagtaccagagcctgctgaccaagaataaggcccgggtgatcattctgatggtgtggattgtgtcaggccttacctccttcttgcccattcagatgcactggtacagggccacccaccaggaagccatcaactgctatgccaatgagacctgctgtgacttcttcacgaaccaagcctatgccattgcctcttccatcgtgtccttctacgttcccctggtgatcatggtcttcgtctactccagggtctttcaggaggccaaaaggcagctccagaagattgacaaatctgagggccgcttccatgtccagaaccttagccaggtggagcaggatgggcggacggggcatggactccgcagatcttccaagttctgcttgaaggagcacaaagccctcaagacgttaggcatcatcatgggcactttcaccctctgctggctgcccttcttcatcgttaacattgtgcatgtgatccaggataacctcatccgtaaggaagtttacatcctcctaaattggataggctatgtcaattctggtttcaatccccttatctactgccggagcccagatttcaggattgccttccaggagcttctgtgcctgcgcaggtcttctttgaaggcctatgggaatggctactccagcaacggcaacacaggggagcagagtggatatcacgtggaacaggagaaagaaaataaactgctgtgtgaagacctcccaggcacggaagactttgtgggccatcaaggtactgtgcctagcgataacattgattcacaagggaggaattgtagtacaaatgactcactgctgtaaagcagtttttctacttttaaagacccccccccgcccaacagaacactaaacagactatttaacttgagggtaataaacttagaataaaattgtaaaattgtatagagatatgcagaaggaagggcatccttctgccttttttatttttttaagctgtaaaaagagagaaaacttatttgagtgattatttgttatttgtacagttcagttcctctttgcatggaatttgtaagtttatgtctaaagagctttagtcctagaggacctgagtctgctatattttcatgacttttccatgtatctacctcactattcaagtattaggggtaatatattgctgctggtaatttgtatctgaaggagattttccttcctacacccttggacttgaggattttgagtatctcggacctttcagctgtgaacatggactcttcccccactcctcttatttgctcacacggggtattttaggcagggatttgaggagcagcttcagttgttttcccgagcaaagtctaaagtttacagtaaataaatt

SEQ ID NO: 112 - DNA, 7512 bp, Homo sapiens
  misc_feature: Incyte ID No: 232719.2
ttcaatgttgatgtgaaaaactcaatgactttcagcggcccggtggaagacatgtttggatatatctgttcaacaatatgaaaatgaagaaggaaaatgggtgcttaattggttctccgttagttggccaacccaaaaacagaactggagatgtctataagtgtccagttgggagaggtgaatcattaccttgcgtaaagttggatctaccagttaatacatcaattcccaatgtcacagaagtaaaggagaacatgacatttggatcaactttagtcaccaacccaaatggaggatttctggcttgtgggcccttatatgcctatagatgtggacatttgcattacacaactggaatctgttctgacgtcagccccacatttcaagtcgtgaattccattgcccctgtacaagaatgcagcactcaactggacatagtcatagtgctggatggttccaacagtatttacccatgggacagtgttacagcttttttaaatgaccttcttgaaagaatggatattggtcctaaacagacacaggttggaattgtacagtatggagaaaacgtgacccatgagttcaacctcaataagtattcttccaccgaagaggtacttgttgcagcaaagaaaatagtccagagaggtggccgccagactatgacagctcttggaatagacacagcaagaaaggaggcattcacggaagcccggggtgcccgaagaggagttaaaaaagtcatggttattgtgacagatggagagtctcatgacaatcatcgactgaagaaggtcatccaagactgtgaagatgaaaacattcaacggttttccatagctattcttggcagctataaccgaggaaatttaagcactgaaaaatttgtggaggaaataaaatcaattgcaagtgaacccactgaaaagcatttcttcaatgtctctgatgaattggctctagtcaccattgttaaaactctgggagaaagaatatttgccctggaagctacagctgaccagtcagcagcttcatttgaaatggaaatgtctcagactggcttcagtgctcattattcacaggactgggtcatgcttggagcagtaggagcctatgattggaatggaacagttgtcatgcagaaggctagtcaaatcataatccctcgaaacacaacctttaatgttgagtctaccaaaaagaatgaaccgcttgcttcttatttaggttacactgtaaactctgctactgcttcttctggagatgtgctctatattgctggacagcctcggtacaatcatacaggccaggtcattatctacaggatggaagatggaaacatcaaaattctccagacgctcagtggagaacagattggttcctactttggcagtattttaacaacaactgacattgacaaggattctaatactgacattcttctagtcggagcccctatgtacatgggaacagagaaggaggagcaaggaaaagtgtatgtgtatgctctcaatcagacaaggtttgaatatcaaatgagcctggaacctattaagcagacgtgctgttcatctcggcagcacaattcatgcacaacagaaaacaaaaatgagccatgcgggggctcgttttggaactgcaattgctgctgtaaaagacctcaatcttgatggatttaatgacatcgtgataggagctccgctggaagatgatcacgggggagctgtgtacatttatcatggaagtggcaagactataaggaaagagtatgcacaacgtattccatcaggtggggatggtaagacactgaaattttttggccagtctatccacggagaaatggatttaaatggtgacggtctgacagatgtgactattgggggccttggtggtgctgccctcttctggtcccgagatgtggccgtagttaaagtgaccatgaattttgagccaaataaagtgaatattcaaaagaaaaactgccatatggagggaaaggaaacagtatgcataaatgctacagtgtgttttgatgtgaaattaaagtctaaagaagacacgatttatgaagctgatttgcagtaccgtgtcaccctagattcactaagacaaatatcacgaagttttttctctggaactcaagagagaaaggttcaaaggaacatcacagttcgaaaatcagaatgcactaagcactccttctacatgttggacaagcatgactttcaggactctgtgagaataacgttggactttaatcttaccgatccagaaaatgggcctgttcttgatgattctctaccaaactcagtacatgaatatattccctttgccaaagattgtggaaataaggaaaaatgtatctcagacctcagcctgcatgtcgccaccactgaaaaggacctgctgattgtccgatcccagaatgataagttcaacgttagcctcacagtcaaaaatacaaaggacagtgcctataacaccaggacaatagtgcattattctccaaatctagttttttcaggaattgaggctatccaaaaagacagttgtgaatctaatcataatatcacatgtaaagttggatatcccttcctgagaagaggagagatggtaactttcaaaatattgtttcagtttaacacatcctatctcatggaaaatgtgaccatttatttaagtgcaacaagtgacagcgaagaacctcctgaaaccctttctgataatgtagtaaacatttctatcccggtaaaatatgaagttggactacagttttacagctctgcaagtgaataccacatttcaattgctgccaatgagacagtccctgaagttattaattctactgaggacattggaaatgaaattaatatcttctacttgattagaaaaagtggatcttttccaatgccagagcttaagctgtcaatttcattccccaatatgacatcaaatggttaccctgtgctgtacccaactggattgtcatcttctgagaatgcaaactgcagaccccatatctttgaggatcctttcagtatcaactctggaaagaaaatgactacatcaactgaccatctcaaacgaggcacaattctggactgcaatacatgtaaatttgctaccatcacatgtaatctcacttcttctgacatcagccaagtcaatgtttcgcttatcttgtggaaaccaacttttataaaatcatatttttccagcttaaatcttactataaggggagaacttcggagtgaaaatgcatctctggttttaagtagcagcaatcaaaaaagagagcttgctattcaaatatccaaagatgggctaccgggcagagtgccattatgggtcatcctgctgagtgcttttgccggattgttgctgttaatgctgctcattttagcactgtggaagattggattcttcaaaagaccactgaaaaagaaaatggagaaatgaaatattttatgaaagaaaataataacaattattcaataatctatcctcaggtttgcctcaaatatgtgacaagaaatgtataattcatgacatagtcatgtaactatgtaatccatcagggattcattacttggaaaatgacaggtcatgcattatccaaaaacaataccaaaaagacatattttataaaatgacaaaaaatattttacataattactcatttttgttgagtaagcaaaattacaaagtgtttttaaaaaaacctgtacaaatatgtttatgtattaaatcaccatccaaaatatttaaggaatatataaaaagatttttatgatcatagaaacatctattttcaaaacaatataaattaagcttttccccttgattcctgttggatatccatgttcagcatgacagtcagcactcgtaaatgccaagaaaagaattacctgaaaaagatcatttctccctattcaaatgagaatattttccctcggtagaatccatatacaatatggattgaaaattaagtcacgaagaatacatttagcatctttgtgttgggttctatacctaaaaattttccctcccggcccaaggtgattggaaagtactgcaattgggctaaaattttatctaggatggaaaatcaggatagactcgtttaaaaacaagtatattaaatgggttaaattaagcttttacagaacatgcttaattctgatattgagctctaaatgcaaaacccttttatactgaaaaaacacttaaagcagttttgtgtggcatcacagtgatttgtcatgaaaagccatatatgggggacatgctaaaatggcttctgaatgaaatacgacagcagagaaagatgccactgaaatgctgaaattatctttgctgagcagcttttgaatgctaagggttccagtatgtgacccaaagaaggagttgtctcaactccttggtacagggttcattcaaacccccaagctgtgagagtgtgtttatttttaattttttaaaaggtatttaatttccaaccacacttcttatttttttgaaaagacaattttccatttcagtattacattttaccaagaagtcactgctttttaggtgtgttgcatcaatatttaaataaaatcccagaaatgtattttaaagaatttcaggtttgaaaactcaaaccaacagaaagatatcacacctttgtatgtgcttctttgttcttgaagtagtcattatggttcattggaatctactgtagcataagctcctaggttgctccatttcttaggaaaatagcaatgaatgaatgtatagtagttgcttgtgtgaactactgctgtaaagtttgctgacatttctgcaacaacatttctccatctgatttaccagaacctgtaacaagaccagaacatgtatttatccagaaactcctgggctctgctttgttcaaagaggagcaaatccacatagaaattaaatgttataaatttatttttttcaaactaatttccaaagaatttagctgaagactcagagtcagcctacctcttgactctccacatctgcatctaagatcctgaaggccaaaggaatgtgcctgtgggatgccaaagccatcagtagctggaagaaagaatacctctttctagaggtttggtgtcctcttgctggcctgtcattatttggaaatacgcgcttttggaatttccttcattttcgctatttccaggttcagaaatcatacctaccacttgttctttctttgcccagtaaaactcagggtttctcttattcagagttaccatgttgcacacccccagtgctcagcctgcccagaagcccttctctgatctcagcaagatcttagtagtaaagctaacggatccattgaaattcatactcagcatctgtgactactagacaaagcccatttactgaaccataagtgtgcacttttaaactaaattgttaactgaaagggaaaaaatagaaatgagggcattttgaagtttttagaaaagagaggaagagctgttggccagatcaaagagatacttataagcccggcacaatttttaacataagtcattcctggctattaagtaaaatatttcatgaaccagaagtcctgtttctctaatattataatttgttgaggttggggtgtgtgggggggtgggtggccagacacatgtacacatataaattgaatacaaaaatagctctataacaccaaaaaacagagtttacagaaaataaacacaaaagctatatctgcaagacaagtttgattcatctagtttcatatagtttcatatagtttcatttttattaatatttaggtttaacttatagttctgcaattatttaaaaaacaagtacagagcgtttgattaaaaaaagtcaacaaatgtttcaaaacagctttgtacaaatgttataaaacatatttaatgattaagaaatgtactagactctatcatttacttttaaaacatttaattagaaaaacaggtgatatttaagactatttataaacttattggctaaattgccaaaaagtttctttttctctaactttggtattctaaataattgattattgctcccattgtaaactgaaccatgtatgcactctcttttctgaccaaactacaatggtatattggtaaattatttaacaacacactgtccaggagggaaaaaaaaaacagtctctgatttgtatcatttgccaatttccatggtccaaatattctctctccattttcaaactaccaaagtgaccctaatcagcttacaaaattcctggaaatgtatctgccacctcttaccaaccagtgtgagctgacttcagcacaccactgagacagatttacacgattagacagattagattagaatagatagattagattagatagattagaatagaatagactattgatagagaacatgttgtgtctatatacatatccaatgacacacagtataatcatgttttaaattatgccaaaagtactgattatatcaagcccagtaaacataatgctacacagcacccattctttaattttgatttctaaaattataaccttcctttgatattaataaaatgttatgaacttgcaggagaaggaaggagttgaaagaaggaaaatataaagggtgatccacagtgaaaatcagacctacacaagccacaaaaaaattgtctcattttcccaaggaattcaaagtcctgtgatacacattacaaaagatgacactttgtaaatattttgaacttctatgatccaatttcaacttcattggtccaatttgtcaaactattttcctctgagcactagattcatgggcaatttaatctctgaatattttctgtgtcataagtgtgcttgaaaagaggcttgtagtaaacagatatttttacaaaatttgatgcttctgcaaccataataattttatctataaatgcgtatatacatatatatatatatatatatacacatacactcacatgcagatatttacatatatagatattctcttttccttttataaaatcaaagtctaggctcaattggaaaatggaaatatttgcaccaaaagaaaaaagtgccattgttgtgatcaatggagtaaagctggggtatagtagaggctggggaagccctgcccatgttctctccaaggccacagcttgcacaccgtgaatggtggccccactggctccatggagtgtgccttcacgcgggggaatgtccttgtccaacacgctgtaatctactccatgggaactgactgtcctgcttttcacaacattgagaaacaggcccagagcctgtctcatgtgccaggtgcagtcacattattgttaaaataaagtggcttctgacaaatcagttcttcaaaatagcatcctatgtacttttcatttcttccaacaaccctcaggcccccttttgccagttttctcccccaggggagattttcaagactactggagaaaaatctgttaataaaacatttgctctgagtacc

SEQ ID NO: 113 - DNA, 2767 bp, Homo sapiens
  misc_feature: Incyte ID No: 369664.2
  unsure 92: a, t, c, g, or other
atgtttgcagattattaattgctttatatttggagcacccctcccttcaatcagcataaatatttgagggtgggctgtgtttagaagatgtntagtctccaatgattacaacatgatgcaccactctcctatacaaattttgatttaagaaaagattttatttttcaaaggaaaccacaagtgaaagcaatcttgaagattcaatagcagttggtcctatagtgcccaggtaagaactttgaagtagcacgtgggattatatgtatttgtaaatatatttgtatacagggcagttgcaaaaaaaagagtatttataattgtccaaagagcttccaaagaggagcagcattgcaacagtgtcgtgtatgagcaaaagtcaagattcttgtggcttctccagagtgcaggcaggaccaaactgatagtaggcaacgtgtctcaggtacaagcaaaccagtccttagaagcaccaatcagtaaacttctttcctgagatttttatttttattcattttattttattttattttatttgagacagggtcttactttgtcacccaggctggaatgcaatggcaagatcatggctcactgcagcgtcgacctcccaggctcaagtgatcctcccatctcagcctccccagtagctgggaccacaagcatgtgccaccacacctggctaattttttgtattttttgtagagacagggttttgccatgttggccaggctggtcttgaactcctaggctcaagcaattcgcctgcctcggtctcccacagtgctgggattacaggcatgagtcactttgcctggcctctttcctgagatgcatggtgcttatgataagcacacattatgtctaggtccctgcttcaagtgtggcactttggacacatgcttcccacattccgattttgtgccaaaacctatgagatgatcgcaatgtgggaatcatggatggctgtggaaaatcctaacacattcatagtagacaggcagaatcatggaatgaaaaggcatggcgttcagactgagggagatgtgactatgaatccctgttgtgcccccctttctttctctccacagaaatggcacagggtgaagcccagtggtttcaagaggcaaagaatctgaatgagcagctgagagcagcttataccagcgccagtttccgccacatgtctttgcttgatatctcttccgatctggccacggaccacttgctgggctgtgatctgtctattgcttcaaaacacatcagcaaacctgtgcaagaacctctggtgctgcctgaggtctttggcaacttgaactctgtcatgtgtgtggagggtgaagctggaagtggaaagacggtcctcctgaagaaaatagcttttctgtgggcatctggatgctgtcccctgttaaacaggttccagctggttttctacctctcccttagttccaccagaccagacgaggggctggccagtatcatctgtgaccagctcctagagaaagaaggatctgttactgaaatgtgcatgaggaacattatccagcagttaaagaatcaggtcttattccttttagatgactacaaagaaatatgttcaatccctcaagtcataggaaaactgattcaaaaaaaccacttatcccggacctgcctattgattgctgtccgtacaaacagggccagggacatccgccgatacctagagaccattctagagatcaaagcatttcccttttataatactgtctgtatattacggaagctcttttcacataatatgactcgtctgcgaaagtttatggtttactttggaaagaaccaaagtttgcagaagatacagaaaactcctctctttgtggcggcgatctgtgctcattggtttcagtatccttttgacccatcctttgatgatgtggctgttttcaagtcctatatggaacgcctttccttaaggaacaaagcgacagctgaaattctcaaagcaactgtgtcctcctgtggtgagctggccttgaaagggtttttttcatgttgctttgagtttaatgatgatgatctcgcagaagcaggggttgatgaagatgaagatctaaccatgtgcttgatgagcaaatttacagcccagagactaagaccattctaccggtttttaagtcctgccttccaagaatttcttgcggggatgaggctgattgaactcctggattcagataggcaggaacatcaagatttgggactgtatcatttgaaacaaatcaactcacccatgatgactcttcacagcgcatcgaactccatttaaaccacagcagaggctttatagaaagcatccgcccagctcttgagctgtctaaggcctctgtcaccaagtgctccataagcaagttggaactcagcgcagccgaacaggaactgcttctcaccctgccttccctggaatctcttgaagtctcagggacaatccagtcacaagaccaaatctttcctaatctggataagttcctgtgcctgaaagaactgtctgtggatctggagggcaatataaatgttttttcagtcattcctgaagaatttccaaacttccaccatatggagaaattattgatccaaatttcagctgagtatgatccttccaaactagtgcttagacatgcatcaggctcaaagtagatgctcaatgtttgttgaatgaacagcaagagcaatggaggagtcctgaaatacacagcaagaagcaaggataattctggctttacttctgtgg

SEQ ID NO: 114 - DNA, 821 bp, Homo sapiens
  misc_feature: Incyte ID No: 021042.1
ttttgaggaacccctcctactatgtacaactattatgtatccataacaatttaaatttttttatttgtttccctgcctagaggctataaaaactctatttcaccaccccaagtgtctttataaatctcaaccacatatttttaaatgttgtgccattggtctcaaggatgaatcagatacaaaagtattcatgccaagatgtaaactcaccgtcatcactagagaaaagatatccaaggatatgtcctagtaataggaggtcattagcctttttctaagctgaagacagtttattctcacaatcttcaagccaacctgtgttatcacctagggtcttacccataatactcagtattttttctctatttagggacctcctggcactccaggtcctcagggtcttcttggtgctcctggtattctgggtctccctggctcgagaggtgaacgtggtctaccaggtgttgctggtgctgtggtgagtgcttgacagtattctgactccattaacataagaacaagattttaaaagctgccacttcaaatgtgacagactgatcactgaataacttcacttaagcattcttcatccatggcattttctttatacagatcacatgtcacttatctaagaagctttaataccaccttacttagacacacactataaagacacagcttaaaattatgcacgcaatgattcctccgttctttccacgcacttaggaacgatacaatctctaatcgcgtttactcctctgcaatatgacatgctggcatcatttcactcctgtaggccgaatgaaactctggaagttctg

SEQ ID NO: 115 - DNA, 7966 bp, Homo sapiens
  misc_feature: Incyte ID No: 418805.7
  unsure 7885, 7887: a, t, c, g, or other
gaattcggcacgagcagcagcaggctcagacctgcttccctggacatttccgggaccgtgagcgagggaaccacgttgccctggattcttgccagctgtacaaagttgaccaggaaaatggctcagcagacaagcccggacactttaacagtacctgaagtggataatccgcattgtccaaacccgtggctgaacgaagaccttgtgaaatccttgcgagaaaacctgttgcagcatgagaagtccaagacagcgaggaaatcggtttctcccaagctctctccagtgatctctccgagaaattccgcccaggcttctgcgcagaatgcttctcagcagcaacatccccaaacagcggcgtttcacggtggcacatacatgttttgatgtggacaatggcacatctgcgggacggagtcccttggatcccatgaccagcccaggatccgggctaattctccaagcaaattttgtccacagtcaacgacgggagtccttcctgtatcgatccgacagcgattatgacctctctccaaagtctatgtcccggaactcctccattgccagtgatatacacggagatgacttgattgtgactccatttgctcaggtcttggccagtctgcgaactgtacgaaacaactttgctgcattaactaatttgcaagatcgagcacctagcaaaagatcacccatgtgcaaccaaccatccatcaacaaagccaccataacagaggaggcctaccagaaactggccagcgagaccctggaggagctggactggtgtctggaccagctagagaccctacagaccaggcactccgtcagtgagatggcctccaacaagtttaaaaggatgcttaatcgggagctcacccatctctctgaaatgagtcggtctggaaatcaagtgtcagagtttatatcaaacacattcttagataagcaacatgaagtggaaattccttctccaactcagaaggaaaaggagaaaaagaaaagaccaatgtctcagatcagtggagtcaagaaattgatgcacagctctagtctgactaattcaagtatcccaaggtttggagttaaaactgaacaagaagatgtccttgccaaggaactagaagatgtgaacaaatggggtcttcatgttttcagaatagcagagttgtctggtaaccggcccttgactgttatcatgcacaccatttttcaggaacgggatttattaaaaacatttaaaattccagtagatactttaattacatatcttatgactctcgaagaccattaccatgctgatgtggcctatcacaacaatatccatgctgcagatgttgtccagtctactcatgtgctattatctacacctgctttggaggctgtgtttacagatttggagattcttgcagcaatttttgccagtgcaatacatgatgtagatcatcctggtgtgtccaatcaatttctgatcaatacaaactctgaacttgccttgatgtacaatgattcctcagtcttagagaaccatcatttggctgtgggctttaaattgcttcaggaagaaaactgtgacattttccagaatttgaccaaaaaacaaagacaatctttaaggaaaatggtcattgacatcgtacttgcaacagatatgtcaaaacacatgaatctactggctgatttgaagactatggttgaaactaagaaagtgacaagctctggagttcttcttcttgataattattccgataggattcaggttcttcagaatatggtgcactgtgcagatctgagcaacccaacaaagcctctccagctgtaccgccagtggacggaccggataatggaggagttcttccgccaaggagaccgagagagggaacgtggcatggagataagccccatgtgtgacaagcacaatgcttccgtggaaaaatcacaggtgggcttcatagactatattgttcatcccctctgggagacatgggcagacctcgtccaccctgacgcccaggatattttggacactttggaggacaatcgtgaatggtaccagagcacaatccctcagagcccctctcctgcacctgatgacccagaggagggccggcagggtcaaactgagaaattccagtttgaactaactttagaggaagatggtgagtcagacacggaaaaggacagtggcagtcaagtggaagaagacactagctgcagtgactccaagactctttgtactcaagactcagagtctactgaaattccccttgatgaacaggttgaagaggaggcagtaggggaagaagaggaaagccagcctgaagcctgtgtcatagatgatcgttctcctgacacgtaacagtgcaaaaactttcatgccttttttttttttaagtagaaaaattgtttccaaagtgcatgtcacatgccacaaccacggtcacacctcactgtcatctgccaggacgtttgttgaacaaaactgaccttgactactcagtccagcgctcaggaatatcgtaaccagttttttcacctccatgtcatccgagcaaggtggacatcttcacgaacagcgtttttaacaagatttcagcttggtagagctgacaaagcagataaaatctactccaaattattttcaagagagtgtgactcatcaggcagcccaaaagtttattggacttggggtttctattcctttttatttgtttgcaatattttcagaagaaaggcattgcacagagtgaacttaatggacgaagcaacaaatatgtcaagaacaggacatagcacgaatctgttaccagtaggaggaggatgagccacagaaattgcataattttctaatttcaagtcttcctgatacatgactgaatagtgtggttcagtgagctgcactgacctctacattttgtatgatatgtaaaacagattttttgtagagcttacttttattattaaatgtattgaggtattatatttaaaaaaaactatgttcagaacttcatctgccactggttatttttttctaaggagtaacttgcaagttttcagtacaaatctgtgctacactggataaaaatctaatttatgaattttacttgcaccttatagttcatagcaattaactgatttgtagtgattcattgtttgttttatataccaatgacttccatattttaaaagagaaaaacaactttatgttgcaggaaaccctttttgtaagtctttctttattatttactttgcattttgtttcactctttccagataagcagagttgctcttcaccagtgtttttcttcatgtgcaaagtgactatttgttctataatacttttatgtgtgttatatcaaatgtgtcttaagcttcatgcaaactcagtcatcagttcgtgttgtctgaagcaagtgggagatatataaatacccagtagctaaaatggtcagtcttttttagatgttttcctacttagtatctcctaataacgttttgctgtgtcactagatgttcatttcacaagtgcatgtctttctaataatccacacatttcatgctctaataatccacacatttcatgctcatttttattgtttttacagccagttatagtaagaaaaaggtttttccccttgtgctgctttataatttagcgtgtgtctgaaccttatccatgtttgctagatgaggtcttgtcaaatatatcactaccattgtcaccggtgaaaagaaacaggtagttaagttagggttaacattcatttcaaccacgaggttgtatatcatgactagcttttactcttggtttacagagaaaagttaaacagccaactaggcagtttttaagaatattaacaatatattaacaaacaccaatacaactaatcctatttggttttaatgatttcaccatgggattaagaactatatcaggaacatccctgagaaacggttttaagtgtagcaactactcttccttaatggacagccacataacatgtaggaagtcctttatcacttatcctcgatccataagcatatcttgcagaggggaactacttctttaaacacatggagggaaagaagatgatgccactggcaccagagggttagtactgtgatgcatcctaaaatatttattatattggtaaaaattctggttaaataaaaaattagagatcactcttggctgatttcagcaccaggaactgtattacagttttagagattaattcctagtgtttacctgattatagcagttggcatcatggggcatttaattctgactttatccccacgtcagccttaataaagtcttctttaccttctctatgaagactttaaagcccaaataatcatttttcacattgatattcaagaattgagatagatagaagccaaagtgggtatctgacaagtggaaaatcaaacgtttaagaagaattacaactctgaaaagcatttatatgtggaacttctcaaggagcctcctggggactggaaagtaagtcatcagccaggcaaatgactcatgctgaagagagtccccatttcagtcccctgagatctagctgatgcttagatcctttgaaataaaaattatgtctttataactctgatcttttacataaagcagaagaggaatcaactagttaattgcaaggtttctactctgtttcctctgtaaagatcagatggtaatctttcaaataagaaaaaaataaagacgtatgtttgaccaagtagtttcacaagaatatttgggaacttgtttcttttaattttatttgtccctgagtgaagtctagaaagaaaggtaaagagtctagagtttattcctctttccaaaacattctcattcctctcctccctactcttagtatttcccccacagagtgcctagaatcttaataatgaataaaataaaaagcagcaatatgtcattaacaaatccagacctgaaagggtaaagggtttataactgcactaataaagagaggctctttttttttcttccagtttgttggtttttaatggtaccgtgttgtaaagatacccactaatggacaatcaaattgcagaaaaggctcaatatccaagagacagggactaatgcactgtacaatcggcttatccttgcccttctctcttgccaaagtgtgcttcagaaatatatactgctttaaaaaagaataaaagaatatccttttacaagtggctttacatttcctaaaatgccataagaaaatgcaatatctgggtactgtatggggaaaaaaatgtccaagtttgtataaaaccagtgcatttcagcttgcaagttactgaacacaataatgctgttttaattttgttttatatcagttaaaattcacaataatgtagatagaacaaattacagacaaggaaagaaaaaacttgaatgaaatggattttacagaaagctttatgataatttttgaatgcattatttattttttgtgccatgcattttttttctcaccaaatgaccttacctgtaatacagtcttgtttgtctgtttacaaccatgtatttattgcaatgtacatactgtaatgttaattgtaaattatctgttcttattaaaacatcatcccatgatgggatggtgttgatatatttggaaactcttggtgagagaatgaatggtgtgtatacatactctgtacatttttcttttctcctgtaatatagtcttgtcaccttagagcttgtttatggaagattcaagaaaactataaaatacttaaagatatataaatttaaaaaaacatagctgcaggtctttggtcccagggctgtgccttaactttaaccaatattttcttctgttttgctgcatttgaaaggtaacagtggagctagggctgggcattttacatccaggcttttaattgattagaattctgccaataggtggattttacaaaaccacagacaacctctgaaagattctgagacccttttgagacagaagctcttaagtacttcttgccagggagcagcactgcatgtgtgatggttgtttgccatctgttgatcaggaactacttcagctacttgcatttgattatttcctttttttctttttttataactcggaaacacaactggggaaatatattctttcccagtgattataaacaatctttttcttttttttaagtccttttggcttctagagctcataggaaaatggacttgatttgaaattggagccagagtttactcgtgttggttatctattcatcagcttcctgacatgttaagagaatacattaaagagaaaatactgttttttaatcctaaaatttttcttccactaagataaaccaaatgtccttacatatatgtaaacccatctatttaaacgcaaaggtgggttgatgtcagtttacatagcagaaagcattcactatcctctaagatttgtttctgcaaaactttcattgctttagaattttaaaatttcaccttgtacaatggccagcccctaaagcaggaaacatttataatggattatatggaaacatcctcccagtacttgcccagcccttgaatcatgtggcttttcagtgaaaggaaagattctttttctaggaaaaatgagcctattttattttattttattttattttttgacacaaactgtagattttagcagccctggcccaaaggaatttgattacttttgttttaaacagtacaaaggggacactataattacaaaaacatccttaactgatttgagttgtttttatttctttggatatattttcagagtggtaaattgtgtgtgagaattacaaatgattattcttttagtggtttcttagcctctcttacagcccacggggatagtactgtacatcaataccttcatatgaaatttttatatgcaatgaaaataaaagcatgggttgattctgcctatttatgactcaatcttttacaaataaaagattattcattttaaattatagttcaatcagcatgtctcttaggatactgaacgtggttgaaatgaaaggatagtgacatcataagttagtactgatattcataaccaaataaagccaacttgagtaattttgctacattaaaaattaccaaaattacttagatggcctataagattaacgcatggtgttttctaagcaagctttgaaaggggccttccatacttacttaattgaatattctgggatattgaaaattattcagatacttgacaattatttttggttacctactccgcaaactacaaagttttaaggactcaacaataagttaatgagacacagtgtttgctttcatggagcttacagtctggaggggacaaaggcttaaacaatactcatataattatatatgtgatcagtacaatgaaggagctcagtggggtaaataagcaggaacctgaacttgatctgttccggagggccacagaaggcttccttgaggccttgagaaagtgatttgcatctgagttctgaaggattgtaagaggtaactagggaaaaagttgacaggaagaggaaggggatccagacaagaaacatttgcaaagatcttgaggcataaatgagcttgagacatctggagaaactgaggaaaagtgagagagtaggcagggcctggagccgcagagccattgctaaccatcctgtgtgagatatcccccattctgtagctttattctcataaccctgctcaattttctttataacacttctcacagatttatatacgtgtttgtttttgttatctgtctctcccaccagaccacagctccatgagagcaaggtctttgcttaccaatatatcagtagcacttaaaactatgcctggtacacagtaggntnttaatatgtgttgaatatagccatcaaattgatattggatataattcaatctgataagatattttgagatattaaagag

SEQ ID NO: 116 - DNA, 4305 bp, Homo sapiens
  misc_feature: Incyte ID No: 1094000.4
  unsure 4301-4302: a, t, c, g, or other
gagacattccggtgggggactctggccagcccgagcaacgtggatcctgagagcactcccaggtaggcatttgccccggtgggacgccttgccagagcagtgtgtggcaggcccccgtggaggatcaacacagtggctgaacactgggaaggaactggtacttggagtctggacatctgaaacttggctctgaaactgcggagcggccaccggacgccttctggagcaggtagcagcatgcagccgcctccaagtctgtgcggacgcgccctggttgcgctggttcttgcctgcggcctgtcgcggatctggggagaggagagaggcttcccgcctgacagggccactccgcttttgcaaaccgcagagataatgacgccacccactaagaccttatggcccaagggttccaacgccagtctggcgcggtcgttggcacctgcggaggtgcctaaaggagacaggacggcaggatctccgccacgcaccatctcccctcccccgtgccaaggacccatcgagatcaaggagactttcaaatacatcaacacggttgtgtcctgccttgtgttcgtgctggggatcatcgggaactccacacttctgagaattatctacaagaacaagtgcatgcgaaacggtcccaatatcttgatcgccagcttggctctgggagacctgctgcacatcgtcattgacatccctatcaatgtctacaagctgctggcagaggactggccatttggagctgagatgtgtaagctggtgcctttcatacagaaagcctccgtgggaatcactgtgctgagtctatgtgctctgagtattgacagatatcgagctgttgcttcttggagtagaattaaaggaattggggttccaaaatggacagcagtagaaattgttttgatttgggtggtctctgtggttctggctgtccctgaagccataggttttgatataattacgatggactacaaaggaagttatctgcgaatctgcttgcttcatcccgttcagaagacagctttcatgcagttttacaagacagcaaaagattggtggctgttcagtttctatttctgcttgccattggccatcactgcatttttttatacactaatgacctgtgaaatgttgagaaagaaaagtggcatgcagattgctttaaatgatcacctaaagcagagacgggaagtggccaaaaccgtcttttgcctggtccttgtctttgccctctgctggcttccccttcacctcagcaggattctgaagctcactctttataatcagaatgatcccaatagatgtgaacttttgagctttctgttggtattggactatattggtatcaacatggcttcactgaattcctgcattaacccaattgctctgtatttggtgagcaaaagattcaaaaactgctttaagtcatgcttatgctgctggtgccagtcatttgaagaaaaacagtccttggaggaaaagcagtcgtgcttaaagttcaaagctaatgatcacggatatgacaacttccgttccagtaataaatacagctcatcttgaaagaagaactattcactgtatttcattttctttatattggaccgaagtcattaaaacaaaatgaaacatttgccaaaacaaaacaaaaaactatgtatttgcacagcacactattaaaatattaagtgtaattattttaacactcacagctacatatgacattttatgagctgtttacggcatggaaagaaaatcagtgggaattaagaaagcctcgtcgtgaaagcacttaattttttacagttagcacttcaacatagctcttaacaacttccaggatattcacacaacacttaggcttaaaaatgagctcactcagaatttctattctttctaaaaagagatttatttttaaatcaatgggactctgatataaaggaagaataagtcactgtaaaacagaacttttaaatgaagcttaaattactcaatttaaaattttaaaatcctttaaaacaacttttcaattaatattatcacactattatcagattgtaattagatgcaaatgagagagcagtttagttgttgcatttttcggacactggaaacatttaaatgatcaggagggagtaacagaaagagcaaggctgtttttgaaaatcattacactttcacctagaagccccaaacctcagcattcctgcaatatgtaacccaacatgtcacaaacaagccagccatgtaacagactggcacatgtgcccagctgaatttaaaatataatacttttaaaaagaaaattattacatcctttacattcagttaagatcaaacctcacaaagagaaatagaatgtttgaaaggctatcccaaaagacttttttgaatctgtcattcacataccctgtgaagacaatactatctacaattttttcaggattattaaaatcttcttctttcactatcgtagcttaaactctgtttggttttgtcatctgtaaatacttacctacatacactgcatgtagatgattaaatgagggcaggccctgtgctcatagctttacgatggagagatgccagtgacctcataataaagactgtgaactgcctggtgcagtgtccacatgacaaaggggcaggtagcaccctctctcacccatgctgtggttaaaatggtttctagcatatgtataatgctatagttaaaatactatttttcaaaatcatacagattagtacatttaacagctacctgtaaagcttattactaatttttgtattatttttgtaaatagccaatagaaaagtttgcttgacatggtgcttttctttcatctagaggcaaaactgctttttgagaccgtaagaacctcttagctttgtgcgttcctgcctaatttttatatcttctaagcaaagtgccttaggatagcttgggatgagatgtgtgtgaaagtatgtacaagagaaaacggaagagagaggaaatgaggtggggttggaggaaacccatggggacagattcccattcttagcctaacgttcgtcattgcctcgtcacatcaatgcaaaaggtcctgattttgttccagcaaaacacagtgcaatgttctcagagtgactttcgaaataaattgggcccaagagctttaactcggtcttaaaatatgcccaaatttttactttgtttttcttttaataggctgggccacatgttggaaataagctagtaatgttgttttctgtcaatattgaatgtgatggtacagtaaaccaaaacccaacaatgtggccagaaagaaagagcaataataattaattcacacaccatatggattctatttataaatcacccacaaacttgttctttaatttcatcccaatcactttttcagaggcctgttatcatagaagtcattttagactctcaattttaaattaattttgaatcactaatattttcacagtttattaatatatttaatttctatttaaattttagattatttttattaccatgtactgaatttttacatcctgataccctttccttctccatgtcagtatcatgttctctaattatcttgccaaattttgaaactacacacaaaaagcatacttgcattatttataataaaattgcattcagtggctttttaaaaaaatgtttgattcaaaactttaacatactgataagtaagaaacaattataatttctttacatactcaaaaccaagatagaaaaaggtgctatcgttcaacttcaaaacatgtttcctagtattaaggactttaatatagcaacagacaaaattattgttaacatggatgttacagctcaaaagatttataaaagattttaacctattttctcccttattatccactgctaatgtggatgtatgttcaaacaccttttagtattgatagcttacatatggccaaaggaatacagtttatagcaaaacatgggtatgctgtagctaactttataaaagtgtaatataacaatgtaaaaaattatatatctgggaggattttttggttgcctaaagtggctatagttactgattttttattatgtaagcaaaaccaataaaaatttaagtttttttaacaactaccttatttttcactgtacagacactaattcattaaatactaattgattgtttaaaagaaatataaatgtgacaagtggacattatttatgttaaatatacaattatcaagcaagtatgaagttattcaattaaaatgccacatttctggtcaaaaaaaaaaaaagnnaga

SEQ ID NO: 117 - DNA, 1892 bp, Homo sapiens
  misc_feature: Incyte ID No: 1094000.5
agctgagagggcatcaggaaggagtttcgacccgcgctggcgagtcatgagcgccaagtttcccactggcgcgcaaacttgagttacttttgagcgtggatactggcgaagaggctgcgggcggtattagcgtttgcagcgacttggctcgggcagctgacccaagtgtcctgtcttccttcctctgcttgtctctaggctctgaaactgcggagcggccaccggacgccttctggagcaggtagcagcatgcagccgcctccaagtctgtgcggacgcgccctggttgcgctggttcttgcctgcggcctgtcgcggatctggggagaggagagaggcttcccgcctgacagggccactccgcttttgcaaaccgcagagataatgacgccacccactaagaccttatggcccaagggttccaacgccagtctggcgcggtcgttggcacctgcggaggtgcctaaaggagacaggacggcaggatctccgccacgcaccatctcccctcccccgtgccaaggacccatcgagatcaaggagactttcaaatacatcaacacggttgtgtcctgccttgtgttcgtgctggggatcatcgggaactccacacttctgagaattatctacaagaacaagtgcatgcgaaacggtcccaatatcttgatcgccagcttggctctgggagacctgctgcacatcgtcattgacatccctatcaatgtctacaagctgctggcagaggactggccatttggagctgagatgtgtaagctggtgcctttcatacagaaagcctccgtgggaatcactgtgctgagtctatgtgctctgagtattgacagatatcgagctgttgcttcttggagtagaattaaaggaattggggttccaaaatggacagcagtagaaattgttttgatttgggtggtctctgtggttctgggctgtccctgaagccataggttttgatataattacgatggactacaaaggaagttatctgcgaatctgcttgcttcatcccgttcagaagacagctttcatgcagttttacaagacagcaaaagattggtggctgttcagtttctatttctgcttgccattggccatcactgcatttttttatacactaatgacctgtgaaatgttgagaaagaaaagtggcatgcagattgctttaaatgatcacctaaagcagagacgggaagtggccaaaaccgtcttttgcctggtccttgtctttgccctctgctggcttccccttcacctcagcaggattctgaagctcactctttataatcagaatgatcccaatagatgtgaacttttgagctttctgttggtattggactatattggtatcaacatggcttcactgaattcctgcattaacccaattgctctgtatttggtgagcaaaagattcaaaaactgctttaagtcatgcttatgctgctggtgccagtcatttgaagaaaaacagtccttggaggaaaagcagtcgtgcttaaagttcaaagctaatgatcacggatatgacaacttccgttccagtaataaatacagctcatcttgaaagaagaactattcactgtatttcattttctttatattggaccgaagtcattaaaacaaaatgaaacatttgccaaaacaaaacaaaaaactatgtatttgcacagcacactattaaaatattaagtgtaattattttaacactcacagctacatatgacattttatgagctgtttacggcatggaaagaaaatcagtgggaattaagaaagcctcgtcgtgaaagcacttaattttttacagttagcacttcaacatagctcttaacaacttccaggatattcacacaacacttaggcttaaaaatgagctc

SEQ ID NO: 118 - DNA, 1877 bp, Homo sapiens
  misc_feature: Incyte ID No: 1222734CB1
agctgagagggcatcaggaaggagtttcgacccgcgctggcgagtcatgagcgccaagtttcccactggcgcgcaaacttgagttacttttgagcgtggatactggcgaagaggctgcgggcggtattagcgtttgcagcgacttggctcgggcagctgacccaagtgtcctgtcttccctcctctgcttgtctctaggctctgaaactgcggagcggccaccggacgccttctggagcaggtagcagcatgcagccgcctccaagtctgtgcggacgcgccctggttgcgctggttcttgcctgcggcctgtcgcggatctggggagaggagagaggcttcccgcctgacagggccactccgcttttgcaaaccgcagagataatgacgccacccactaagaccttatggcccaagggttccaacgccagtctggcgcggtcgttggcacctgcggaggtgcctaaaggagacaggacggcaggatctccgccacgcaccatctcccctcccccgtgccaaggacccatcgagatcaaggagactttcaaatacatcaacacggttgtgtcctgccttgtgttcgtgctggggatcatcgggaactccacacttctgagaattatctacaagaacaagtgcatgcgaaacggtcccaatatcttgatcgccagcttggctctgggagacctgctgcacatcgtcattgacatccctatcaatgtctacaagctgctggcagaggactggccatttggagctgagatgtgtaagctggtgcctttcatacagaaagcctccgtgggaatcactgtgctgagtctatgtgctctgagtattgacagatatcgagctgttgcttcttggagtagaattaaaggaattggggttccaaaatggacagcagtagaaattgttttgatttgggtggtctctgtggttctggctgtccctgaagccataggttttgatataattacgatggactacaaaggaagttatctgcgaatctgcttgcttcatcccgttcagaagacagctttcatgcagttttacaagacagcaaaagattggtggctgttcagtttctatttctgcttgccattggccatcactgcatttttttatacactaatgacctgtgaaatgttgagaaagaaaagtggcatgcagattgctttaaatgatcacctaaagcagagacgggaagtggccaaaaccgtcttttgcctggtccttgtctttgccctctgctggcttccccttcacctcagcaggattctgaagctcactctttataatcagaatgatcccaatagatgtgaacttttgagctttctgttggtattggactatattggtatcaacatggcttcactgaattcctgcattaacccaattgctctgtatttggtgagcaaaagattcaaaaactgctttaagtcatgcttatgctgctggtgccagtcatttgaagaaaaacagtccttggaggaaaagcagtcgtgcttaaagttcaaagctaatgatcacggatatgacaacttccgttccagtaataaatacagctcatcttgaaagaagaactattcactgtatttcattttctttatattggaccgaagtcattaaaacaaaatgaaacatttgccaaaacaaaacaaaaaactatgtatttgcacagcacactattaaaatattaagtgtaattattttaacactcacagctacatatgacattttatgagctgtttacggcatggaaagaaaatcagtgggaattaagaaagcctcgtcgtgaaagcacttaattttttacagttagcacttcaacatagctcttaacaacttccaggatattcacacaacactcctgg

SEQ ID NO: 119 - DNA, 3138 bp, Homo sapiens
  misc_feature: Incyte ID No: 411205.5
acgggacgcgacgccaatcgcgacgaggcttcgccccgtggcgcggtttgaaattttgcggggctcaacggctcgcggagcggctacgcggagtgacatcgccggtgtttgcgggtggttgttgctctcggggccgtgtggagtaggtctggacctggactcacggctgcttggagcgtccgccatgaggagaagtgaggtgctggcggaggagtccatagtatgtctgcagaaagccctaaatcaccttcgggaaatatgggagctaattgggattccagaggaccagcggttacaaagaactgaggtggtaaagaagcatatcaaggaactcctggatatgatgattgctgaagaggaaagcctgaaggaaagactcatcaaaagcatatccgtctgtcagaaagagctgaacactctgtgcagcgagttacatgttgagccatttcaggaagaaggagagacgaccatcttgcaactagaaaaagatttgcgcacccaagtggaattgatgcgaaaacagaaaaaggagagaaaacaggaactgaagctacttcaagagcaagatcaagaactgtgcgaaattctttgtatgccccactatgatattgacagtgcctcagtgccccagcttagaagagctgaaccagttcaggcaacatgtgacaactttgagggaaacaaaggcttctaggcgtgaggagtttgtcagtataaagagacagatcatactgtgtatggaagaattagaccacaccccagacacaagctttgaaagagatgtggtgtgtgaagacgaagatgccttttgtttgtctttggagaatattgcaacactacaaaagttgctacggcagctggaaatgcagaaatcacaaaatgaagcagtgtgtgaggggctgcgtactcaaatccgagagctctgggacaggttgcaaatacctgaagaagaaagagaagctgtggccaccattatgtctgggtcaaaggccaaggtccggaaagcgctgcaattagaagtggatcggttggaagaactgaaaatgcaaaacatgaagaaagtgattgaggcaattcgagtggagctggttcagtactgggaccagtgcttttatagccaggagcagagacaagcttttgcccctttctgtgctgaggactacacagaaagtctgctccagctccacgatgctgagattgtgcggttaaaaaactactatgaagttcacaaggaactctttgaaggtgtccagaagtgggaagaaacctggaggcttttcttagagtttgagagaaaagcttcagatccaaatcgatttacaaaccgaggaggaaatcttctaaaagaagaaaaacaacgagccaagctccagaaaatgctgcccaagctggaagaagagttgaaggcacgaattgaattgtgggaacaggaacattcaaaggcatttatggtgaatgggcagaaattcatggagtatgtggcagaacaatgggagatgcatcgattggagaaagagagagccaagcaggaaagacaactgaagaacaaaaaacagacagagacagagatgctgtatggcagcgctcctcgaacacctagcaagcggcgaggactggctcccaatacaccgggcaaagcacgtaagctgaacactaccaccatgtccaatgctacggccaatagtagcattcggcctatctttggagggacagtctaccactcccccgtgtctcgacttcctccttctggcagcaagccagtcgctgcttccacctgttcagggaagaaaacaccccgtactggcaggcatggagccaacaaggagaacctggagctcaacggcagcatcctgagtggtgggtaccctggctcggcccccctccagcgcaacttcagcattaattctgttgccagcacctattctgagtttgcgaaggatccgtccctctctgacagttccactgttgggcttcagcgagaactttcaaaggcttccaaatctgatgctacttctggaatcctcaattcaaccaacatccagtcctgagaagccctgatcagtcaaccaggctgtggcttcctgtgcctagactggacctaattatatgggggtgactttagtttttcttcagcttaggcgtgcttgaaaccttggccaggttccatgaccatgggcctaacttaaagatgtgaatgagtgttacagttgaaagcccatcataggtttagtggtcctaggagacttggttttgacttatatacatgaaaagtttatggcaagaagtgcaaattttagcatatggggcctgacttctctaccacataattctacttgctgaagcatgatcaaagcttgttttatttcaccactgtaggaaaatgattgactatgcccatccctgggggtaattttggcatgtatacctgtaactagtaattaacatcttttttgtttaggcatgttcaattaatgctgtagctatcatagctttgctcttacctgaagccttgtccccaccacacaggacagccttcctcctgaagagaatgtctttgtgtgtccgaagttgagatggcctgccctactgccaaagaggtgacaggaaggctgggagcagctttgttaaattgtgttcagttctgttacacagtgcattgccctttgttgggggtatgcatgtatgaacacacatgcttgtcggaacgctttctcggcgtttgtcccttggctctcatctcccccattcctgtgcctactttgcctgagttcttctacccccgcagttgccagccacattgggagtctgtttgttccaatgggttgagctgtctttgtcgtggagatctggaactttgcacatgtcactactggggaggtgttcctgctctagcttccacgatgaggcgccctctttacctatcctctcaatcactactcttcttgaagcactattatttattcttccgctgtctgcctgcagcagtactactgtcaacatagtgtaaatggttctcaaaagcttaccagtgtggacttggtgttagccacgctgtttactcatacagtacgtgtcctgtttttaaaatatacaattattcttaaaaataaattaaaatctgtatacttacatttcaaa

SEQ ID NO: 120 - DNA, 679 bp, Homo sapiens
  misc_feature: Incyte ID No: 1092777.6
ggacttcataggaaggcgtgagtacaattagtataatgcataactcattgttgtcctagatattttgatatttacctttatgttgaatgctattaaatgttttcctgtgtcaaagtaaaatattgttaataaacctaacaatgaccctgatagtacaggttaagtgagagaactatatgaattctaacaagtcataggttaatatttaagacactgaaaaatctaagtgatataaatcagattcttctctctcaattttatccctcacctgtagcagccagtcccgtttcatttagtcatgtgaccactctgtcttgtgtttccacagcctgcaagtcagtccaggatgctaacatctaaaaatagacttaaatctcattgcttacaagcctaagaatctttagagaagtatacataagtttaggataaaataatgggattttcttttcttttctctggtaatattgacttgtatattttaagaaataacagaaagcctgggtgacatttgggagacatgtgacatttatatattgaattaatatccctacatgtattgcacattgtaaaaagttttagttttgatgagttgtgagtttaccttgtatactgtaggcacactttgcactgatatatcatgagtgaataaatgtcttgcctactcacgtctcaaaaaaaa

SEQ ID NO: 121 - DNA, 2791 bp, Homo sapiens
  misc_feature: Incyte ID No: 234358.5
ggcgaggaatggcggtatttgtgagaggagtcggcgtttgaagaggtggaactcctagatatctccaacacaccagagtctagcattaactatggagacaccccaaagtcttgtactaagtcttctaaaagctccactccagttccttcaaagcagtcagcaaggtggcaagttgcaaaagagctttatcaaactgaaagtaattatgttaatatattggcaacaattattcagttatttcaagtaccattggaagaggaaggacaacgtggtggacctatccttgcaccagaggagattaagactatttttggtagcatcccagatatctttgatgtacacactaagataaaggatgatcttgaagaccttatagttaattgggatgagagcaaaagcattggtgacatttttctgaaatattcaaaagatttggtaaaaacctaccctccctttgtaaacttctttgaaatgagcaaggaaacaattattaaatgtgaaaaacagaaaccaagatttcatgcttttctcaagataaaccaagcaaaaccagaatgtggacggcagagccttgttgaacttcttatccgaccagtacagaggttacccagtgttgcattacttttaaatgatcttaagaagcatacagctgatgaaaatccagacaaaagcactttagaaaaagctattggatcactgaaggaagtaatgacgcatattaatgaggataagagaaaaacagaagctcaaaagcaaatttttgatgttgtttatgaagtagatggatgcccagctaatcttttatcttctcaccgaagcttagtacagcgggttgaaacaatttctctaggtgagcacccctgtgacagaggagaacaagtaactctcttcctcttcaatgattgcctagagatagcaagaaaacggcacaaggttattggcacttttaggagtcctcatggccaaacccgacccccagcttctcttaagcatattcacctaatgcctctttctcagattaagaaggtattggacataagagagacagaagattgccataatgcttttgccttgcttgtgaggccaccaacagagcaggcaaatgtgctactcagtttccagatgacatcagatgaacttccaaaagaaaactggctaaagatgctgtgtcgacatgtagctaacaccatttgtaaagcagatgctgagaatcttatttatactgctgatccagaatcctttgaagtaaatacaaaagatatggacagtacattgagtagagcatcaagagcaataaaaaagacttcaaaaaaggttacaagagcattctctttctccaaaactccaaaaagagctcttcgaagggctcttatgacatcccacggctcagtggagggaagaagtccttccagcaatgataagcatgtaatgagtcgtctttctagcacatcatcattagcaggtatcccttctccctcccttgtcagccttccttccttctttgaaaggagaagtcatacgttaagtagatctacaactcatttgatatgaagcgttaccaaaatcttaaattatagaaatgtatagacacctcatactcaaataagaaactgacttaaatggtacttgtaattagcacttggtgaaagctggaaggaagataaataacactaaactatgctatttgatttttcttcttgaaagagtaaggtttacctgttacattttcaagttaattcatgtaaaaaatgatagtgattttgatgtaatttatctcttgtttgaatctgtcattcaaaggccaataatttaagttgctatcagctgatattagtagctttgcaaccctgatagagtaaataaattttatgggtgggtgccaaatactgctgtgaatctatttgtatagtatccatgaatgaatttatggaaatagatatttgtgcagctcaatttatgcagagattaaatgacatcataatactggatgaaaacttgcatagaattctgattaaatagtgggtctgtttcacatgtgcagtttgaagtatttaaataaccactcctttcacagtttattttcttctcaagcgttttcaagatctagcatgtggattttaaaagatttgccctcattaacaagaataacatttaaaggagattgtttcaaaatatttttgcaaattgagataaggacagaaagattgagaaacattgtatattttgcaaaaacaagatgtttgtagctgtttcagagagagtacggtatatttatggtaattttatccactagcaaatcttgatttagtttgatagtgtgtggaattttattttgaaggataagaccatgggaaaattgtggtaaagactgtttgtacccttcatgaaataattctgaagttgccatcagttttactaatcttctgtgaaatgcatagatatgcgcatgttcaactttttattgtggtcttataattaaatgtaaaattgaaaattcatttgctgtttcaaagtgtgatatctttcacaatagcctttttatagtcagtaattcagaataatcaagttcatatggataaatgcatttttatttcctatttctttagggagtgctacaaatgtttgtcacttaaatttcaagtttctgttttaatagttaactgactatagattgttttctatgccatgtatgtgccacttctgagagtagtaaatgactctttgctacattttaaaagcaattgtattagtaagaactttgtaaataaatacctaaaacccaagtgtaaaa

SEQ ID NO: 122 - DNA, 2458 bp, Homo sapiens
  misc_feature: Incyte ID No: 1092777.7
tgctacttaacaacttacatccaggagcagtacgtggtccgagctagagtcaacaccaaggcccagggggaatggagtgaagatctcactgcttggacccttagtgacattcttcctcctcaaccagaaaacatcaagatttccaacattacacactcctcggctgtgatttcttggacaatattggatggctattctatttcttctattactatccgttacaaggttcaaggcaagaatgaagaccagcacgttgatgtgaagataaagaatgccaccatcactcagtatcagctcaagggcctagagcctgaaacagcataccaggtggacatttttgcagagaacaacatagggtcaagcaacccagccttttctcatgaactggtgaccctcccagaatctcaagcaccagcggacctcggaggggggaagatgctgcttatagccatccttggctctgctggaatgacctgcctgactgtgctgttggcctttctgatcatattgcaattgaagagggcaaatgtgcaaaggagaatggcccaagccttccaaaacagggaagaaccagctgtgcagttcaactcagggactctggccctaaacaggaaggtcaaaaacaacccagatcctacaatttatccagtgcttgactggaatgacatcaaatttcaagatgtgattggggagggcaattttggccaagttcttaaggcgcgcatcaagaaggatgggttacggatggatgctgccatcaaaagaatgaaagaatatgcctccaaagatgatcacagggactttgcaggagaactggaagttctttgtaaacttggacaccatccaaacatcatcaatctcttaggagcatgtgaacatcgaggctacttgtacctggccattgagtacgcgccccatggaaaccttctggacttccttcgcaagagccgtgtgctggagacggacccagcatttgccattgccaatagcaccgcgtccacactgtcctcccagcagctcctttacttcgctgccgacgtggcccggggcatggactacttgagccaaaaacagtttatccacagggatctggctgccagaaacattttagttggtgaaaactatgtggcaaaaatagcagattttggattgtcccgaggtcaagaggtgtatgtgaaaaagacaatgggaaggctcccagtgcgctggatggccatcgagtcactgaattacagtgtgtacacaaccaacagtgatgtatggtcctatggtgtgttactatgggagattgttagcttaggaggcacaccctactgcgggatgacttgtgcagaactctacgagaagctgccccagggctacagactggagaagcccctgaactgtgatgatgaggtgtatgatctaatgagacaatgctggcgggagaagccttatgagaggccatcatttgcccagatattggtgtccttaaacagaatgttagaggagcgaaagacctacgtgaataccacgctttatgagaagtttacttatgcaggaattgactgttctgctgaagaagcggcctaggacagaacatctgtataccctctgtttccctttcactggcatgggagacccttgacacctgctgagaaaacatgcctctgccaaaggatgtgatatataagtgtacatatgtgctgtacacctgggaccttcaccactgtagatcccatgcatggatctatgtagtatgctctgactctaataggactgtatatactgttttaagaatgggctgaaatcagaatgcctgtttgtggtttcatatgcaataatatatttttttaaaaatgtggacttcataggaaggcgtgagtacaattagtataatgcataactcattgttgtcctagatattttgatatttacctttatgttgaatgctattaaatgttttcctgtgtcaaagtaaaatattgttaataaacctaacaatgaccctgatagtacaggttaagtgagagaactatatgaattctaacaagtcataggttaatatttaagacactgaaaaatctaagtgatataaatcagattcttctctctcaattttatccctcacctgtagcagccagtcccgtttcatttagtcatgtgaccactctgtcttgtgtttccacagcctgcaagtcagtccaggatgctaacatctaaaaatagacttaaatctcattgcttacaagcctaagaatctttagagaagtatacataagtttaggataaaataatgggattttcttatcttttctctggtaatattgacttgtatattttaagaaataacagaaagcctgggtgacatttgggagacatgtgacatttatatattgaattaatatccctacatgtattgcacattgtaaaaagttttagttttgatgagttgtgagtttaccttgtatactgtagg

SEQ ID NO: 123 - DNA, 5825 bp, Homo sapiens
  misc_feature: Incyte ID No: 4180444CB1
attgctaagccatccttcagacagagagggagcggctgcaagaggtaatgagagatggcaagaaagaagctgaaaaaatttactactttggagattgtgctcagtgttcttctgcttgtgttgtttatcatcagtattgttctaattgtgcttttagccaaagagtcactgaaatcaacagccccagatcctgggacaactggtaccccggatcctgggacaactggtaccccagatcctggaacaactggtaccacacatgctaggacaacgggtcccccagatcctggaacaactggtaccactcctgtttctgctgaatgtccagtggtaaatgaattggaacgaattaattgcatccctgaccagccgccaacaaaggccacatgtgaccaacgtggctgttgctggaatccccagggagctgtaagtgttccctggtgctactattccaagaatcatagctaccatgtagagggcaaccttgtcaacacaaatgcaggattcacagcccggttgaaaaatctgccttcctcaccagtgtttggaagcaatgttgacaatgttcttctcacagcagaatatcagacatctaatcgtttccactttaagttgactgaccaaaccaataacaggtttgaagtgccccacgaacacgtgcagtccttcagtggaaatgctgctgcttctttgacctaccaagttgaaatctccagacagccatttagcatcaaagtgaccagaagaagcaacaatcgtgttttgtttgactcgagcattgggcccctactgtttgctgaccagttcttgcagctctccactcgactgcctagcactaacgtgtatggcctgggagagcatgtgcaccagcagtatcggcatgatatgaattggaagacctggcccatatttaacagagacacaactcccaatggaaacggaactaatttgtatggtgcgcagacattcttcttgtgccttgaagatgctagtggattgtcctttggggtgtttctgatgaacagcaatgccatggaggttgtccttcagcctgcgccagccatcacttaccgcaccattgggggcattctcgacttctatgtgttcttgggaaacactccagagcaagttgttcaagaatatctagagctcattgggcggccagcccttccctcctactgggcgcttggatttcacctcagtcgttacgaatatggaaccttagacaacatgagggaagtcgtggagagaaatcgcgcagcacagctcccttatgatgttcagcatgctgatattgattatatggatgagagaagggacttcacttatgattcagtggattttaaaggcttccctgaatttgtcaacgagttacacaataatggacagaagcttgtcatcattgtggatccagccatctccaacaactcttcctcaagtaaaccctatggcccatatgacaggggttcggatatgaagatatgggtgaatagttcagatggagtgactccactcattggggaggtctggcctggacaaactgtgtttcctgattataccaatcccaactgtgctgtttggtggacaaaggaatttgagctttttcacaatcaagtagagtttgatggaatctggattgatatgaatgaagtctccaactttgttgatggttcggtctcaggatgttccacaaacaacctaaataatcccccattcactcccagaatcctggatgggtacctgttctgcaagactctctgtatggatgcagtgcagcactggggcaagcagtatgacattcacaatctgtatggctactccatggcggtcgccacagcagaagctgccaagactgtgttccctaataagagaagcttcattctgacccgttctacctttgcgggctctggcaagtttgcagcacattggttaggagacaacactgccacctgggatgacctgagatggtccatccctggcgtgcttgagttcaacctttttggcatcccaatggtgggtcctgacatatgtggctttgctttggacacccctgaggagctctgtaggcggtggatgcagttgggtgcattttatccgttttctagaaatcacaatggccaaggctacaaggaccaggatcctgcctcctttggagctgactccctgctgttgaattcctccaggcactaccttaacatccgctatactctattgccctacctatacacccttttcttccgtgctcacagccgaggggacacggtggccaggccccttttgcatgagttctacgaggacaacagcacttgggatgtgcaccaacagttcttatgggggcccggcctcctcatcactccagttctggatgaaggtgcagagaaagcgatggcatatgtgcctgatgctgtctggtatgactacgagactgggagccaagtgagatggaggaagcaaaaagtcgagatggaacttcctggagacaaaattggacttcaccttcgaggaggctacatcttccccacacagcagccaaatacaaccactctggccagtcgaaagaaccctcttggtcttatcattgccctagatgagaacaaagaagcaaaaggagaacttttctgggatgatggggaaacgaaggatactgtggccaataaagtgtatcttttatgtgagttttctgtcactcaaaaccgcttggaggtgaatatttcacaatcaacctacaaggaccccaataatttagcatttaatgagattaaaattcttgggacggaggaacctagcaatgttacagtgaaacacaatggtgtcccaagtcagacttctcctacagtcacttatgattctaacctgaaggttgccattatcacagatattgatcttctcctgggagaagcatacacagtggaatggagcataaagataagggatgaagaaaaaatagactgttaccctgatgagaatggtgcttctgccgaaaactgcactgcccgtggctgtatctgggaggcatccaattcttctggagtccctttttgctattttgtcaacgacctatactctgtcagtgatgttcagtataattcccatggggccacagctgacatctccttaaagtcttccgtttatgccaatgccttcccctccacacccgtgaacccccttcgcctggatgtcacttaccataagaatgaaatgccgcagttcaagatttatgatcccaacaagaatcggtatgaagttccagtccctctgaacatacccagcatgccatccagcacccctgagggtcaactctatgatgtgctcattaagaagaatccatttgggattgaaattcgccggaagagtataggcactataatttgggactctcagctccttggctttaccttcagtgacatgtttatccgcatctccacccgccttccctccaagtacctctatggctttggggagactgagcacacgtcctacaggagagacttggagtggcacacttgggggatgttctcccgagaccagcccccagggtacaagaagaattcctatggtgtccacccctactacatggggctagaggaggatggcagtgcccatggagtgctcctgctgaacagcaatgccatggatgtgacgttccagcccctgcctgccttgacataccgtaccacagggggagttctggacttttatgtgttcttggggccaactccagagcttgtcacccagcagtacactgagttgattggccggcctgtgatggtaccttactggtctttggggttccagctgtgtcgctatggctaccagaacgactctgagatctccagcttgtatgatgagatggtggctgcccagatcccttatgatgtgcagtactcagacatcgactacatggagcggcagctggacttcaccctcagccccaagtttgctgggtttccagctctgatcaatcgcatgaaggctgatgggatgcgggtcatcctcattctggatccagccatttctggcaatgagacacagccttatcctgccttcactcggggcgtggaggatgacgtcttcatcaaatacccaaatgatggagacattgtctggggaaaggtctggcctgattttcctgatgttgttgtgaatgggtctctagactgggacagccaagtggagctatatcgagcttatgtggccttcccagactttttccgtaattcaactgccaagtggtggaagagggaaatagaagaactatacaacaatccacagaatccagagaggagcttgaagtttgatggcatgtggattgatatgaatgaaccatcaagcttcgtgaatggggcagtttctccaggctgcagggacgcctctctgaaccaccctccctacatgccacatttggagtccagggacaggggcctgagcagcaagaccctttgtatggagagtcagcagatcctcccagacggctccctggtgcagcactacaacgtgcacaacctgtatgggtggtcccagaccagacccacatacgaagccgtgcaggaggtgacgggacagcgaggggtcgtcatcacccgctccacatttccctcttctggccgctgggcaggacattggctgggagacaacacggccgcatgggatcagctgaagaagtctatcattggcatgatggagttcagcctcttcggcatatcctatacgggagcagatatctgtgggttctttcaagatgctgaatatgagatgtgtgttcgctggatgcagctgggggccttttaccccttctcaagaaaccacaacaccattgggaccaggagacaagaccctgtgtcctgggatgttgcttttgtgaatatttccagaactgtcctgcagaccagatgcaccctgttgccatatctgtataccttgatgcataaggcccacacggagggcgtcactgttgtgcggcctctgctccatgaatttgtgtcagaccaggtgacatgggacatagacagtcagttcctgctgggcccagccttcctggtcagccctgtcctggagcgtaatgccagaaatgtcactgcatatttccctagagcccgttggtacgattactacacgggtgtggatattaatgcaagaggagagtggaagaccttgccagcccctcttgaccacattaatcttcatgtccgtgggggctacatcctgccctggcaagagcctgcactgaacacccacttaagccgccagaaattcatgggcttcaaaattgccttggatgatgaaggaactgctgggggctggctcttctgggatgatgggcaaagcattgatacctatgggaaaggactctattacttggccagcttttctgccagccagaatacgatgcaaagccatataattttcaacaattacatcactggtacaaatcctttgaaactgggctacattgaaatctggggagtgggcagtgtccccgttaccagtgtcagcatctctgtgagtggcatggtcataacaccctccttcaacaatgaccccacgacacaggtattaagcatcgatgtgactgacagaaacatcagcctacataattttacttcattgacgtggataagcactctgtgaatttttacagcaagattctaactaactatgaatgactttgaaactacttatacttcatactcataaaaattattgtgtgttgctaatttgttcatacccactattggtgaaatatttctgttaattttgttatatgttttttgtgtgaaccctaaaggttaaaccttagccctgtgggataggcagttagggaggtg

SEQ ID NO: 124 - DNA, 2351 bp, Homo sapiens
  misc_feature: Incyte ID No: 1987983CB1
caacactgagaagttatcttaagggaggctgggccccattctactcatctggcccagaaagtgaacaccttgggggccactaaggcagccctgctaggggagacgctccaacctgtcttctctctgtctcctggcagctctcttggcctcctagtttctacctaatcatgtccctggtggaggccatcagcctctggaatgaaggggtgctggcagcggacaagaaggactggaagggagccctggatgccttcagtgccgtccaggacccccactcccggatttgcttcaacattggctgcatgtacactatcctgaagaacatgactgaagcagagaaggcctttaccagaagcattaaccgagacaagcacttggcagtggcttacttccaacgagggatgctctactaccagacagagaaatatgatttggctatcaaagaccttaaagaagccttgattcagcttcgagggaaccagctgatagactataagatcctggggctccagttcaagctgtttgcctgtgaggtgttatataacattgctttcatgtatgccaagaaggaggaatggaaaaaagctgaagaacagttagcattggccacgagcatgaagtctgagcccagacattccaaaatcgacaaggcgatggagtgtgtctggaagcagaagctatatgagccagtggtgatccctgtgggcaggctgtttcgaccaaatgagagacaagtggctcagctggccaagaaggattacctaggcaaggcgacggtcgtggcatctgtggtggatcaagacagtttctctgggtttgcccctctgcaaccacaggcagctgagcctccacccagaccgaaaaccccagagatcttcagggctctggaaggggaggctcaccgtgtgctatttgggtttgtgcctgagacaaaagaagagctccaggtcatgccagggaacattgtctttgtcttgaagaagggcaatgataactgggccacggtcatgttcaacgggcagaaggggcttgttccctgcaactaccttgaaccagttgagctgcggatccaccctcagcagcagccccaggaggaaagctctccgcagtccgacatcccagctcctcctagttccaaagcccctggaagaccccagctgtcaccaggccagaaacaaaaagaagagcctaaggaagtgaagctcagtgttcccatgccctacacactcaaggtgcactacaagtacacggtagtcatgaagactcagcccgggctcccctacagccaggtccgggacatggtgtctaagaaactggagctccggctggaacacactaagctgagctatcggcctcgggacagcaatgagctggtgcccctttcagaagacagcatgaaggatgcctggggccaggtgaaaaactactgcctgactctgtggtgtgagaacacagtgggtgaccaaggctttccagatgaacccaaggaaagtgaaaaagctgatgctaataaccagacaacagaacctcagcttaagaaaggcagccaagtggaggcactcttcagttatgaggctacccaaccagaggacctggagtttcaggaaggggatataatcctggtgttatcaaaggtgaatgaagaatggctggaaggggagtgcaaagggaaggtgggcattttccccaaagtttttgttgaagactgcgcaactacagatttggaaagcactcggagagaagtctaggatgtttcacaaactacaaagctgaagaaaatgaagccctattacttgtttgtaagatttagcacccttctgctgtatactgtactgagacattacagtttggaagtgttaactatttattccctgttaaaatttaacctactagacaatgatgtgagtacccaggatgatttcctggggcacagtgggtgaggagatggggacaggtgaatggaggagttaggggagaggaaaagtggatggaagtgtctggaaagggcacgagagagtcttccaggtactgatcctgtttcttgctctgagtgctagctagccagctgtgttcacactgtaaacattcatcaagctgtacatttggtgcacttttctgtgtcataccacaataaaaaaaaacctatcatcatcttacaaaaacaagacacccaagtccaggcccaaggagtaagtacaaatattcctgtttctgaaccattactgtaattggctcttaaggcttgaagtaaccttataggttactcataaggcatatacaaataaacttgtttgttttcttttttcaaaaaaaaaaaaaaacaagaaagaaacagcatacaaaaaacaaaa

SEQ ID NO: 125 - DNA, 1531 bp, Homo sapiens
  misc_feature: Incyte ID No: 1398420.2
aggaaggacagcacagctgacagccgtgctcaggaagtttctggatcctaggctcatctccacagaggagaacacacaggcagcagagaccatggggcccctctcagcccctccctgcacagagcacatcaaatggaaggggctcctggtcacagcatcacttttaaacttctggaacctgcccaccactgcccaagtcacgattgaagcccagccaccaaaagtttccgaggggaaggatgttcttctacttgtccacaatttgccccagaatcttactggctacatctggtacaaagggcaaatcagggacctctaccattacattacatcatatgtagtagacggtcaaataattatatatgggcctgcatatagtggacgggaaacagcatattccaatgcatccctgctgatccagaatgtcacccgggaggacgcaggatcctacaccttacacatcataaagcgaggtgatgggactagaggagtaactggatatttcaccttcaccttatacctggagactcccaagccctccatctccagcagcaacttaaaccccagggaggccatggaaactgtgatcttaacctgtgatcctgagactccggacacaagctaccagtggtggatgaatggtcagagcctccctatgactcataggtttcagctgtccgaaaccaacaggaccctctttctatttggtgtcacaaagtatactgcaggaccctatgaatgtgaaatacggaactcagggagtgccagccgcagtgacccagtcaccctgaatctcctccatggtccagacctccccagaattcacccttcatacaccaattaccgttcaggagataacctctacttgtcttgcttcgcgaactctaacccaccggcacagtattcttggacaattaatgggaagtttcagcaatcaggacaaaatctgtttatcccccaaattactacaaagcatagcgggctctatgtttgctctgttcgtaactcagccactggcgaggaaagctccacatcgttgacagtcaaagtctctgcttctacaagaataggacttcttcctctccttaatccaacatagcagctgtgatgtcatttctgtatttcaggaagactggcaggagatttatggaaaggtctcttacaaggactcttgaatacaagctcctgataacttcaagatcataccactggactaagaactttcaaaattttaatgaacaggctgataccttcatgaaattcaagacaaagaagaaaaatactcaatgttattggactaaataatcaaaaggataatgatttcataattttctatttgaaaatgtgctgattcttggaatgtttcattctccagatttatgaacattttttcttgagcaattggtaaagtatacttttgtaaacaaaaattgaaacatttccttttgctctctatctgagtgccccagaattgggaatctattcatgagtattcatatgtttatggtaataaagctatttgcacaagttc

SEQ ID NO: 126 - DNA, 1661 bp, Homo sapiens
  misc_feature: Incyte ID No: 1749102CB1
cagcaactattataagatgctctgaaaactcttcagacactgaggggcaccagaggagcagactacaagaatggcacacgctatggaaaactcctggacaatcagtaaagagtaccatattgatgaagaagtgggctttgctctgccaaatccacaggaaaatctacctgatttttataatgactggatgttcattgctaaacatctgcctgatctcatagagtctggccagcttcgagaaagagttgagaagttaaacatgctcagcattgatcatctcacagaccacaagtcacagcgccttgcacgtctagttctgggatgcatcaccatggcatatgtgtggggcaaaggtcatggagatgtccgtaaggtcttgccaagaaatattgctgttccttactgccaactctccaagaaactggaactgcctcctattttggtttatgcagactgtgtcttggcaaactggaagaaaaaggatcctaataagcccctgacttatgagaacatggacgttttgttctcatttcgtgatggagactgcagtaaaggattcttcctggtctctctattggtggaaatagcagctgcttctgcaatcaaagtaattcctactgtattcaaggcaatgcaaatgcaagaacgggacactttgctaaaggcgctgttggaaatagcttcttgcttggagaaagcccttcaagtgtttcaccaaatccacgatcatgtgaacccaaaagcatttttcagtgttcttcgcatatatttgtctggctggaaaggcaacccccagctatcagacggtctggtgtatgaagggttctgggaagacccaaaggagtttgcagggggcagtgcaggccaaagcagcgtctttcagtgctttgacgtcctgctgggcatccagcagactgctggtggaggacatgctgctcagttcctccaggacatgagaagatatatgccaccagctcacaggaacttcctgtgctcattagagtcaaatccctcagtccgtgagtttgtcctttcaaaaggtgatgctggcctgcgggaagcttatgacgcctgtgtgaaagctctggtctccctgaggagctaccatctgcaaatcgtgactaagtacatcctgattcctgcaagccagcagccaaaggagaataagacctctgaagacccttcaaaactggaagccaaaggaactggaggcactgatttaatgaatttcctgaagactgtaagaagtacaactgagaaatcccttttgaaggaaggttaatgtaacccaacaagagcacattttatcatagcagagacatctgtatgcattcctgtcattacccattgtaacagagccacaaactaatactatgcaatgttttaccaataatgcaatacaaaagacctcaaaatacctgtgcatttcttgtaggaaaacaacaaaaggtaattatgtgtaattatactagaagttttgtaatctgtatcttatcattggaataaaatgacattcaataaataaaaatgcataagatatattctgtcggctgggcgcggtggctcacgcctgtaatcccagcactttgggaggccgaggcgggcggatcacaaggtcaggagatcgagaccatcttggctaacacggtgaaacccgtctc

SEQ ID NO: 127 - DNA, 3131 bp, Homo sapiens
  misc_feature: Incyte ID No: 2965804CB1
gggaagatgagaaggggggctcccttctctagtagcaaagggtgaggagactgagtctcctttctactgccaggtcactggggactatttgtcatgggagtggaggtgataaggaaggtaggtaggagtgaacagcctggggggctgctgtgagatcctgaggtggggcgctgccccaactcctgccactgttccctcctcctgtactttcctgtgctccccctcccaccaggagctagggagtgtggcactgagccggctcaggcagagacgcggcaccatggctagcaagaaagtctgcattgtaggctccgggaactggggctcagccatcgccaagatcgtgggtggcaatgcagcccagctggcacagtttgacccacgggtgaccatgtgggtatttgaggaagacattggaggcaaaaagctgactgagatcatcaacacgcagcatgagaatgtcaaatacctgccagggcacaagttgcccccaaatgtggtggctgtcccagatgtggtccaggctgcagaggatgctgacatcctgatctttgtggtgccccatcagttcatcggcaagatctgtgaccagctcaagggccatctgaaggcaaacgccactggcatatctcttattaagggggtagacgagggccccaatgggctgaagctcatctcggaagtgattggggagcgcctcggcatccccatgagtgtgctgatgggggccaacattgccagcgaggtggctgatgagaagttctgtgagacaaccattggctgcaaggacccggcccagggacaactcctgaaagagctgatgcagacaccaaacttccgtatcacagtggtgcaagaggtggacacagtagagatctgtggagccttaaagaatgtagtggccgtgggggctggcttctgtgatggcctgggctttggcgacaacaccaaggcggcagtgatccggctgggactcatggagatgatagccttcgccaagctcttctgcagtggccctgtgtcctctgccaccttcttggagagctgtggtgttgctgacctgatcactacctgctatggagggcggaaccggaaagtggctgaggcctttgcgcgtacaggaaagtccattgagcagctggagaaagagttgctgaatgggcagaaactgcaggggcccgagacagcccgggagctatacagcatcctccagcacaagggcctggtagacaagtttcccttgttcatggctgtgtacaaggtgtgctacgagggccagccagtgggtgaattcatccactgcctgcagaatcatccagaacatatgtgagtggggccagggcccaggccaggccgcttttttaccccagtggagaccagcagaagcctggggtacctagtcaccaggatctccaggactcccagggagcagagtcttctcatcttttcactggaggacaggaggctatggggcccagctacgcacctggagatcctgaactgtcaagccactggcagcctcatgccaccacatttgccagaaatgcagttgccctgtccctctccagatgtggggctttctccatatcctctgggaggggtggaatcaagccccagtgctgcctgcttggtggcgggggtgatgtatgtggagaagggttgggggagaggccggtagggcaggggctgctagtggctgtctcacatacaccagtaatcctgttaaagggctgaagaagtatcttagccacaggagcgatgaggcaaggattgtcagggaggggtctgggcttctgagctgatgcaggccccaaggacccctttgctgacctctgccaggacccacacagcttcgatggatctcagtgtttgttaacaaaatacaaagatctcaaacaaaccccttttagcttctcctagcaacatctgtgtcctcagaaacctctggttctcccccttccccctcccccaggctgccctggcacccaaattgctgccatgctggcatctgtagctcggtggcttgacattctccccagggacttcccggttcctagttctttgccagctcctccccactctgtgcgacctttccaagccttccctcaccctccccgccagcaccctctttggggagcaggaacttaatctgctgacagagctacacctttcataacaggctcagatcactcagctccctgtgacctttgtattcacccaggcttccttctcagtagctctagctgggggaggtgtcagctgggcccctcctgtgctatctccccagaggacatccctgactccacccctttcttcctcccaaactctgcacctcttcctcagctgctccagaccggccagggtaaccagctaaccatgcctggcatctggaagccagcaggccagagggtggcccaaaggctgatgaacggtagggaagggtgagcagattcctatgttggtgggcaccaatattccaagggcagctctctttgctgaatgagggccttctcgtgaggtactgacaacaccagcaactcgagagctgggaaactcaaggaggaggaagaaaatcaaaaccaccctactccctggggtgaggaaagaacaggaggggaggaggaggagtgtgctctgcacttgccttgctccaggatggggtggcagcagaggaatgtcacaggtcagcagcctaggcctccagctataaatagtccggagggcccgagaggctcccgcccgtccagcagggctgtcagcttcctgtgtggcagcacctggcacactggctctggccagcattatgctaaaaccctgttactctccaatgaaccagggaggcgggctcctctctgcgcctatcccttgagaattctgtcttaccagtgaagggtggggctgcccagatcaggcagcaggagtgaggggcacagtcaccccaggccttgctgagcccaggtctgggtactgagtgtccagagctgcctccccaggaggttaaggtgggggcaaaggggaagcttcaagcactttgcctacttttgttcactccccagtgcactgtgactcaggccttcccatcaggcctatttgtctacccaataaagcgtgttttttccagaaaaaaaaaa

SEQ ID NO: 128 - DNA, 1889 bp, Homo sapiens
  misc_feature: Incyte ID No: 210095.21
aaacagcagaggtgacagagcagccgtgctcgaagcgttcctggagcccaagctctcctccacaggtgaagacagggccagcaggagacaccatggggcacctctcagccccacttcacagagtgcgtgtaccctggcaggggcttctgctcacagcctcacttctaaccttctggaacccgcccaccactgcccagctcactactgaatccatgccattcaatgttgcagaggggaaggaggttcttctccttgtccacaatctgccccagcaactttttggctacagctggtacaaaggggaaagagtggatggcaaccgtcaaattgtaggatatgcaataggaactcaacaagctaccccagggcccgcaaacagcggtcgagagacaatataccccaatgcatccctgctgatccagaacgtcacccagaatgacacaggattctacaccctacaagtcataaagtcagatcttgtgaatgaagaagcaactggacagttccatgtatacccggagctgcccaagccctccatctccagcaacaactccaaccctgtggaggacaaggatgctgtggccttcacctgtgaacctgagactcaggacacaacctacctgtggtggataaacaatcagagcctcccggtcagtcccaggctgcagctgtccaatggcaacaggaccctcactctactcagtgtcacaaggaatgacacaggaccctatgagtgtgaaatacagaacccagtgagtgcgaaccgcagtgacccagtcaccttgaatgtcacctatggcccggacacccccaccatttccccttcagacacctattaccgtccaggggcaaacctcagcctctcctgctatgcagcctctaacccacctgcacagtactcctggcttatcaatggaacattccagcaaagcacacaagagctctttatccctaacatcactgtgaataatagtggatcctatacctgccacgccaataactcagtcactggctgcaacaggaccacagtcaagacgatcatagtcactgagctaagtccagtagtagcaaagccccaaatcaaagccagcaagaccacagtcacaggagataaggactctgtgaacctgacctgctccacaaatgacactggaatctccatccgttggttcttcaaaaaccagagtctcccgtcctcggagaggatgaagctgtcccagggcaacaccaccctcagcataaaccctgtcaagagggaggatgctgggacgtattggtgtgaggtcttcaacccaatcagtaagaaccaaagcgaccccatcatgctgaacgtaaactataatgctctaccacaagaaaatggcctctcacctggggccattgctggcattgtgattggagtagtggccctggttgctctgatagcagtagccctggcatgttttctgcatttcgggaagaccggcagctcaggaccactccaatgacccacctaacaagatgaatgaagttacttattctaccctgaactttgaagcccagcaacccacacaaccaacttcagcctccccatccctaacagccacagaaataatttattcagaagtaaaaaagcagtaatgaaacctgtcctgctcactgcagtgctgatgtatttcaagtctctcaccctcatcactaggagattcctttcccctgtaggggtagaggggtggggacagaaacaactttctcctactcttccttcctaataggcatctccaggctgcctggtcactgcccctctctcagtgtcaatagatgaaagtacatcgggagtctgtaggaaagccaagcttcttgtcattgaaatttcgcaaagctgacttggggaaagagggaccagaact

SEQ ID NO: 129 - DNA, 3676 bp, Homo sapiens
  misc_feature: Incyte ID No: 1555752CB1
gtgggcttgaggtggccggtttgttagggagtcgtgtgcgtgccttggtcgcttctgtagctccgagggcaggttgcggaagaaagcccaggcggtctgtggcccagaggaaaggcctgcagcaggacgaggacctgagccaggaatgcaggatggcggcggtgaagaaggaagggggtgctctgagtgaagccatgtccctggagggagatgaatgggaactgagtaaagaaaatgtacaacctttaaggcaagggcggatcatgtccacgcttcagggagcactggcacaagaatctgcctgtaacaatactcttcagcagcagaaacgggcatttgaatatgaaattcgattttacactggaaatgaccctctggatgtttgggataggtatatcagctggacagagcagaactatcctcaaggtgggaaagagagtaatatgtcaacgttattagaaagagctgtagaagcactacaaggagaaaaacgatattatagtgatcctcgatttctcaatctctggcttaaattagggcgtttatgcaatgagcctttggatatgtacagttacttgcacaaccaagggattggtgtttcacttgctcagttctatatctcatgggcagaagaatatgaagctagagaaaactttaggaaagcagatgcgatatttcaggaagggattcaacagaaggctgaaccactagaaagactacagtcccagcaccgacaattccaagctcgagtgtctcggcaaactctgttggcacttgagaaagaagaagaggaggaagtttttgagtcttctgtaccacaacgaagcacactagctgaactaaagagcaaagggaaaaagacagcaagagctccaatcatccgtgtaggaggtgctctcaaggctccaagccagaacagaggactccaaaatccatttcctcaacagatgcaaaataatagtagaattactgtttttgatgaaaatgctgatgaggcttctacagcagagttgtctaagactacagtccagccatggatagcaccccccatgcccagggccaaagagaatgagctgcaagcaggcccttggaacacaggcaggtccttggaacacaggcctcgtggcaatacagcttcactgatagctgtacccgctgtgcttcccagtttcactccatatgtggaagagactgcacaacagccagttatgacaccatgtaaaattgaacctagtataaaccacatcctaagcaccagaaagcctggaaaggaagaaggagatcctctacaaagggttcagagccatcagcaagcgtctgaggagaagaaagagaagatgatgtattgtaaggagaagatttatgcaggagtaggggaattctcctttgaagaaattcgggctgaagttttccggaagaaattaaaagagcaaagggaagccgagctattgaccagtgcagagaagagagcagaaatgcagaaacagattgaagagatggagaagaagctaaaagaaatccaaactactcagcaagaaagaacaggtgatcagcaagaagagacgatgcctacaaaggagacaactaaactgcaaattgcttccgagtctcagaaaataccaggaatgactctatccagttctgtttgtcaagtaaactgttgtgccagagaaacttcacttgcggagaacatttggcaggaacaacctcattctaaaggtcccagtgtacctttctccatttttgatgagtttcttctttcagaaaagaagaataaaagtcctcctgcagatcccccacgagttttagctcaacgaagaccccttgcagttctcaaaacctcagaaagcatcacctcaaatgaagatgtgtctccagatgtttgtgatgaatttacaggaattgaacccttgagcgaggatgccattatcacaggcttcagaaatgtaacaatttgtcctaacccagaagacacttgtgactttgccagagcagctcgttttgtatccactccttttcatgagataatgtccttgaaggatctcccttctgatcctgagagactgttaccggaagaagatctagatgtaaagacctctgaggaccagcagacagcttgtggcactatctacagtcagactctcagcatcaagaagctgagcccaattattgaagacagtcgtgaagccacacactcctctggcttctctggttcttctgcctcggttgcaagcacctcctccatcaaatgtcttcaaattcctgagaaactagaacttactaatgagacttcagaaaaccctactcagtcaccatggtgttcacagtatcgcagacagctactgaagtccctaccagagttaagtgcctctgcagagttgtgtatagaagacagaccaatgcctaagttggaaattgagaaggaaattgaattaggtaatgaggattactgcattaaacgagaatacctaatatgtgaagattacaagttattctgggtggcgccaagaaactctgcagaattaacagtaataaaggtatcttctcaacctgtcccatgggacttttatatcaacctcaagttaaaggaacgtttaaatgaagattttgatcatttttgcagctgttatcaatatcaagatggctgtattgtttggcaccaatatataaactgcttcacccttcaggatcttctccaacacagtgaatatattacccatgaaataacagtgttgattatttataaccttttgacaatagtggagatgctacacaaagcagaaatagtccatggtgacttgagtccaaggtgtctgattctcagaaacagaatccacgatccctatgattgtaacaagaacaatcaagctttgaagatagtggacttttcctacagtgttgaccttagggtgcagctggatgtttttaccctcagcggctttcggactgtacagatcctggaaggacaaaagatcctggctaactgttcttctccctaccaggtagacctgtttggtatagcagatttagcacatttactattgttcaaggaacacctacaggtcttctgggatgggtccttctggaaacttagccaaaatatttctgagctaaaagatggtgaattgtggaataaattctttgtgcggattctgaatgccaatgatgaggccacagtgtctgttcttggggagcttgcagcagaaatgaatggggtttttgacactacattccaaagtcacctgaacaaagccttatggaaggtagggaagttaactagtcctggggctttgctctttcagtgagctaggcaatcaagtctcacagattgctgcctcagagcaatggttgtattgtggaacactgaaactgtatgtgctgtaatttaatttaggacacatttagatgcactaccattgctgttctactttttggtacaggtatattttgacgtcactgatattttttatacagtgatatacttactcatggccttgtctaacttttgtgaagaactattttattctaaacagactcattacaaatggttaccttgttatttaacccatttgtctctacttttccctgtacttttcccatttgtaatttgtaaaatgttctcttatgatcaccatgtattttgtaaataataaaatagtatctgttaaaaaaaaaa

SEQ ID NO: 130 - DNA, 498 bp, Homo sapiens
  misc_feature: Incyte ID No: 110245.1
cgcctggttaaatatttttggcaagagtacttcataggccaccctcaaaatttcagcatcactcgtaccaagtatctatcacaaggcagcatgtgtctacatctccaccccagtgctgttacagtgggacagtttctagtgtattgtcattgcgaccaggcttttaagattcttagcatatctgtaatatccacatgcagatgtagaatccaaatcgtatttacagagaactttgcatggcagcttttatatggtagtgatacattcagtttcttacattctagattattcagggaggttctggagttggacagatttggggttaagcctgatggctagctgtgtgaccttacacacctcgcttcatctgtttcctatgggaatttataatagtagctacttcctagggcacaggatctggcccagggaagacctcagtgttagtggactctttaatgatcgttagcagctgttgtgatcataaaacgagaagcacat

SEQ ID NO: 131 - DNA, 1750 bp, Homo sapiens
  misc_feature: Incyte ID No: 009476CB1
gccgcatggtaactcaggcgccgggcgcactgtcctagctgctggttttccacgctggttttagctcccggcgtctgcaaaatgaagattgaggaggtgaagagcactacgaagacgcagcgcatcgcctcccacagccacgtgaaagggctggggctggacgagagcggcttggccaagcaggcggcctcagggcttgtgggccaggagaacgcgcgagaggcatgtggcgtcatagtagaattaatcgaaagcaagaaaatggctggaagagctgtcttgttggcaggacctcctggaactggcaagacagctctggctctggctattgctcaggagctgggtagtaaggtccccttctgcccaatggtggggagtgaagtttactcaactgagatcaagaagacagaggtgctgatggagaacttccgcagggccattgggctgcgaataaaggagaccaaggaagtttatgaaggtgaagtcacagagctaactccgtgtgagacagagaatcccatgggaggatatggcaaaaccattagccatgtgatcataggactcaaaacagccaaaggaaccaaacagttgaaactggaccccagcatttttgaaagtttgcagaaagagcgagtagaagctggagatgtgatttacattgaagccaacagtggggccgtgaagaggcagggcaggtgtgatacctatgccacagaattcgaccttgaagctgaagagtatgtccccttgccaaaaggggatgtgcacaaaaagaaagaaatcatccaagatgtgaccttgcatgacttggatgtggctaatgcgcggccccaggggggacaagatatcctgtccatgatgggccagctaatgaagccaaagaagacagaaatcacagacaaacttcgaggggagattaataaggtggtgaacaagtacatcgaccagggcattgctgagctggtcccgggtgtgctgtttgttgatgaggtccacatgctggacattgagtgcttcacctacctgcaccgcgccctggagtcttctatcgctcccatcgtcatctttgcatccaaccgaggcaactgtgtcatcagaggcactgaggacatcacatcccctcacggcatccctcttgaccttctggaccgagtgatgataatccggaccatgctgtatactccacaggaaatgaaacagatcattaaaatccgtgcccagacggaaggaatcaacatcagtgaggaggcactgaaccacctgggggagattggcaccaagaccacactgaggtactcagtgcagctgctgaccccggccaacttgcttgctaaaatcaacgggaaggacagcattgagaaagagcatgtcgaagagatcagtgaacttttctatgatgccaagtcctccgccaaaatcctggctgaccagcaggataagtacatgaagtgagatggctgaggttttcagcagtaagagactccccaggtgtgcctggcctgggtccagcctgtgggcgcttgcccctgggcttggggctgccgtccccactcaggcgtggtctgcagcgctgtcagttcagtgtggaaagcatttctttttaagttatcgtaactgttcctgtggttgctttgaaagaacccttccttacctggtgtgttttctataaatcttcataggttattttgattctctctctctctctctctaagttttttaaaaataaacttttcagaacagaaaaaaaaaa

SEQ ID NO: 132 - DNA, 1816 bp, Homo sapiens
  misc_feature: Incyte ID No: 1560874CB1
acttcaggcgtccggccgccgtggctatgttcgtgtccgatttccgcaaagagttctacgaggtggtccagagccagagggtccttctcttcgtggcctcggacgtggatgctctgtgtgcgtgcaagatccttcaggccttgttccagtgtgaccacgtgcaatatacgctggttccagtttctgggtggcaagaacttgaaactgcatttcttgagcataaagaacagtttcattattttattctcataaactgtggagctaatgtagacctattggatattcttcaacctgatgaagacactatattctttgtgtgtgacacccataggccagtcaatgtcgtcaatgtatacaacgatacccagatcaaattactcattaaacaagatgatgaccttgaagttcccgcctatgaagacatcttcagggatgaagaggaggatgaagagcattcaggaaatgacagtgatgggtcagagccttctgagaagcgcacacggttagaagaggagatagtggagcaaaccatgcggaggaggcagcggcgagagtgggaggcccggagaagagacatcctctttgactacgagcagtatgaatatcatgggacatcgtcagccatggtgatgtttgagctggcttggatgctgtccaaggacctgaatgacatgctgtggtgggccatcgttggactaacagaccagtgggtgcaagacaagatcactcaaatgaaatacgtgactgatgttggtgtcctgcagcgccacgtttcccgccacaaccaccggaacgaggatgaggagaacacactctccgtggactgcacacggatctcctttgagtatgacctccgcctggtgctctaccagcactggtccctccatgacagcctgtgcaacaccagctataccgcagccaggttcaagctgtggtctgtgcatggacagaagcggctccaggagttccttgcagacatgggtcttcccctgaagcaggtgaagcagaagttccaggccatggacatctccttgaaggagaatttgcgggaaatgattgaagagtctgcaaataaatttgggatgaaggacatgcgcgtgcagactttcagcattcattttgggttcaagcacaagtttctggccagcgacgtggtctttgccaccatgtctttgatggagagccccgagaaggatggctcagggacagatcacttcatccaggctctggacagcctctccaggagtaacctggacaagctgtaccatggcctggaactcgccaagaagcagctgcgagccacccagcagaccattgccagctgcctttgcaccaacctcgtcatctcccaggggcctttcctgtactgctctctcatggagggcactccagatgtcatgctgttctctaggccggcatccctaagcctgctcagcaaacacctgctcaagtcctttgtgtgttcgacaaagaaccggcgctgcaaactgctgcccctggtgatggctgcccccctgagcatggagcatggcacagtgaccgtggtgggcatccccccagagaccgacagctcggacaggaagaacttttttgggagggcgtttgagaaggcagcggaaagcaccagctcccggatgctgcacaaccattttgacctctcagtaattgagctgaaagctgaggatcggagcaagtttctggacgcacttatttccctcctgtcctaggaatttgattcttccagaatgaccttcttatttatgtaactggctttcatttagattgtaagttatggacatgatttgagatgtagaag

SEQ ID NO: 133 - DNA, 3922 bp, Homo sapiens
  misc_feature: Incyte ID No: 3571894CB1
tctcccgccccttcctggattccctcacccgtctcgatcccctctccgccctttcccagagacccagagcccctgaccccccgcgccctccccggagccccccgcgcgtgccgcggccatggcggccgtgcgcggggcgcccctgctcagctgcctcctggcgttgctggccctgtgccctggagggcgcccgcagacggtgctgaccgacgacgagatcgaggagttcctcgagggcttcctgtcagagctagaacctgagccccgggaggacgacgtggaggccccgccgcctcccgagcccaccccgcgggtccgaaaagcccaggcggggggcaagccagggaagcggccagggacggccgcagaagtgcctccggaaaagaccaaagacaaagggaagaaaggcaagaaagacaaaggccccaaggtgcccaaggagtccttggaggggtcccccaggccgcccaagaaggggaaggagaagccacccaaggccaccaagaagcccaaggagaagccacctaaggccaccaagaagcccaaggagaagccacccaaggccaccaagaagcccaaagagaagccacccaaggccaccaagaagcccccgtcagggaagaggccccccattctggctccctcagaaaccctggagtggccactgcccccaccccccagccctggccccgaggagctaccccaggagggaggggcgcccctctcaaataactggcagaatccaggagaggagacccatgtggaggcacgggagcaccagcctgagccggaggaggagaccgagcaacccacactggactacaatgaccagatcgagagggaggactatgaggactttgagtacattcggcgccagaagcaacccaggccacccccaagcagaaggaggaggcccgagcgggtctggccagagacccctgaggagaaggccccggccccagccccggaggagaggattgagcctcctgtgaagcctctgctgcccccgctgccccctgactatggtgatggttacgtgatccccaactacgatgacatggactattactttgggcctcctccgccccagaagcccgatgctgagcgccagacggacgaagagaaggaggagctgaagaaacccaaaaaggaggacagcagccccaaggaggagaccgacaagtgggcagtggagaagggcaaggaccacaaagagccccgaaagggcgaggagttggaggaggagtggacgcctacggagaaagtcaagtgtccccccattgggatggagtcacaccgtattgaggacaaccagatccgagcctcctccatgctgcgccacggcctgggggcacagcgcggccggctcaacatgcagaccggtgccactgaggacgactactatgatggtgcgtggtgtgccgaggacgatgccaggacccagtggatagaggtggacaccaggaggactacccggttcacaggcgtcatcacccagggcagagactccagcatccatgacgattttgtgaccaccttcttcgtgggcttcagcaatgacagccagacatgggtgatgtacaccaacggctatgaggaaatgacctttcatgggaacgtggacaaggacacacccgtgctgagtgagctcccagagccggtggtggctcgtttcatccgcatctacccactcacctggaatggcagcctgtgcatgcgcctggaggtgctggggtgctctgtggcccctgtctacagctactacgcacagaatgaggtggtggccaccgatgacctggatttccggcaccacagctacaaggacatgcgccagctcatgaaggtggtgaacgaggagtgccccaccatcacccgcacttacagcctgggcaagagctcacgaggcctcaagatctatgccatggagatctcagacaaccctggggagcatgaactgggggagcccgagttccgctacactgctgggatccatggcaacgaggtgctgggccgagagctgttgctgctgctcatgcagtacctgtgccgagagtaccgcgatgggaacccacgtgtgcgcagcctggtgcaggacacacgcatccacctggtgccctcactgaaccctgatggctacgaggtggcagcgcagatgggctcagagtttgggaactgggcgctgggactgtggactgaggagggctttgacatctttgaagatttcccggatctcaactctgtgctctggggagctgaggagaggaaatgggtcccctaccgggtccccaacaataacttgcccatccctgaacgctacctttcgccagatgccacggtatccacggaggtccgggccatcattgcctggatggagaagaaccccttcgtgctgggagcaaatctgaacggcggcgagcggctagtatcctacccctacgatatggcccgcacgcctacccaggagcagctgctggccgcagccatggcagcagcccggggggaggatgaggacgaggtctccgaggcccaggagactccagaccacgccatcttccggtggcttgccatctccttcgcctccgcacacctcaccttgaccgagccctaccgcggaggctgccaagcccaggactacaccggcggcatgggcatcgtcaacggggccaagtggaacccccggaccgggactatcaatgacttcagttacctgcataccaactgcctggagctctccttctacctgggctgtgacaagttccctcatgagagtgagctgccccgcgagtgggagaacaacaaggaggcgctgctcaccttcatggagcaggtgcaccgcggcattaagggggtggtgacggacgagcaaggcatccccattgccaacgccaccatctctgtgagtggcattaatcacggcgtgaagacagccagtggtggtgattactggcgaatcttgaacccgggtgagtaccgcgtgacagcccacgcggagggctacaccccgagcgccaagacctgcaatgttgactatgacatcggggccactcagtgcaacttcatcctggctcgctccaactggaagcgcatccgggagatcatggccatgaacgggaaccggcctatcccacacatagacccatcgcgccctatgaccccccaacagcgacgcctgcagcagcgacgcctacaacaccgcctgcggcttcgggcacagatgcggctgcggcgcctcaacgccaccaccaccctaggcccccacactgtgcctcccacgctgccccctgcccctgccaccaccctgagcactaccatagagccctggggcctcataccgccaaccaccgctggctgggaggagtcggagactgagacctacacagaggtggtgacagagtttgggaccgaggtggagcccgagtttgggaccaaggtggagcccgagtttgagacccagttggagcctgagtttgagacccagctggaacccgagtttgaggaagaggaggaggaggagaaagaggaggagatagccactggccaggcattccccttcacaacagtagagacctacacagtgaactttggggacttctgagatcagcgtcctaccaagaccccagcccaactcaagctacagcagcagcacttcccaagcctgctgaccacagtcacatcacccatcagcacatggaaggcccctggtatggacactgaaaggaagggctggtcctgcccctttgagggggtgcaaacatgactgggacctaagagccagaggctgtgtagaggctcctgctccacctgccagtctcgtaagagatggggttgctgcagtgttggagtaggggcagagggagggagccaaggtcactccaataaaacaagctcatggcacggacaaagaaaagatgacaaaaaaacg

SEQ ID NO: 134 - DNA, 688 bp, Homo sapiens
  misc_feature: Incyte ID No: 349622.1
aaaaactcctggtacttgagcactgatctgctttggagaacctgattctgagactccagcaggatgtcttatcaacagcagcagtgcaagcagccctgccagccacctcctgtgtgccccacgccaaagtgcccagagccatgtgccacccccgaagtgccctgagccctgcccaccaccaaagtgtccacagccctgcccacctcagcagtgccagcaaaaatgtcctcctgtgacaccttccccaccctggccagccaaagtgtccacccaagagcaagtaacagcttcagaattcatcaggagcatgaaaggataaggataattggctcaccttgttccacagcttcacctgcatcttctcatcaaagcctaccatggatacacagttagcttctttcctcttagccagtgatctgcccatgatgatccctgatagcaaaaggtttcctttctgaggctgccatattgccactgtccaggtggagactgagaaaggaagtcctcagcagtgtcagttcccagagctttggaagaaggaccagcagctctgtccctgggaaccatcaaaaaatgctgttgatgttttctgtgtctgtctgtcacctgggcatgggcttctaacacctgtgcaattgtcacttttctttcactccctgaataaaatatctttgcatacgtaaaaaaa

SEQ ID NO: 135 - DNA, 1272 bp, Homo sapiens
  misc_feature: Incyte ID No: 002940CB1
cggcgtggcagattcagttgtttgcgggcggccgggagagtagcagtgccttggaccccagctctcctccccctttctctctaaggatggcccagaaggagaactcctacccctggccctacggccgacagacggctccatctggcctgagcaccctgccccagcgagtcctccggaaagagcctgtcaccccatctgcacttgtcctcatgagccgctccaatgtccagcccacagctgcccctggccagaaggtgatggagaatagcagtgggacacccgacatcttaacgcggcacttcacaattgatgactttgagattgggcgtcctctgggcaaaggcaagtttggaaacgtgtacttggctcgggagaagaaaagccatttcatcgtggcgctcaaggtcctcttcaagtcccagatagagaaggagggcgtggagcatcagctgcgcagagagatcgaaatccaggcccacctgcaccatcccaacatcctgcgtctctacaactatttttatgaccggaggaggatctacttgattctagagtatgccccccgcggggagctctacaaggagctgcagaagagctgcacatttgacgagcagcgaacagccacggtccgggcgatcatggaggagttggcagatgctctaatgtactgccatgggaagaaggtgattcacagagacataaagccagaaaatctgctcttagggctcaagggagagctgaagattgctgacttcggctggtctgtgcatgcgccctccctgaggaggaagacaatgtgtggcaccctggactacctgcccccagagatgattgaggggcgcatgcacaatgagaaggtggatctgtggtgcattggagtgctttgctatgagctgctggtggggaacccaccctttgagagtgcatcacacaacgagacctatcgccgcatcgtcaaggtggacctaaagttccccgcttccgtgcccacgggagcccaggacctcatctccaaactgctcaggcataacccctcggaacggctgcccctggcccaggtctcagcccacccttgggtccgggccaactctcggagggtgctgcctccctctgcccttcaatctgtcgcctgatggtccctgtcattcactcgggtgcgtgtgtttgtatgtctgtgtatgtataggggaaagaagggatccctaactgttcccttatctgttttctacctcctcctttgtttaataaaggctgaagctttttgtaaaaaaaaaa

SEQ ID NO: 136 - DNA, 1706 bp, Homo sapiens
  misc_feature: Incyte ID No: 1362466CB1
ggctcgagagagcatcggccggcgaccgttccggcggccattgcgaaaacttccccacggctactgcgtccacgtggcggtggcgtggggactccctgaaagcagagcggcagggcgcccggaagtcgtgagtcgagtcttcccgggctaatccatgccgggttggaggctgctgacgcaggtcggcgcccaggtgctgggtcgactcggggacggcctgggtgctgccctgggcccggggaacagaacacacatctggctttttgttagaggtcttcatggaaagagtggtacatggtgggatgagcatctttctgaagaaaatgtcccattcattaagcagttggtctctgatgaagataaagcccaattagcaagtaaactgtgtcctctgaaagatgaaccatggcctatacatccttgggaaccaggttcctttagagttggtcttattgccttgaagctgggcatgatgcctttatggaccaaggatggtcaaaagcatgtggtcacattacttcaggtacaagactgtcatgtcttaaaatatacgtcaaaggaaaactgtaatggaaaaatggcaaccctgtctgtaggaggaaaaactgtatcacgttttcgtaaagctacatccatattggaattttaccgggaacttggattgccgccgaaacagacagttaaaatctttaatataacagataatgctgcaattaaaccaggcactcctctttatgctgctcactttcgtccaggacagtatgtggatgtcacagccaaaactattggtaaaggttttcaaggtgtcatgaaaagatggggatttaaaggccagcctgctacgcatggtcaaacgaaaacccacaggagacctggagctgttgcaactggtgatattggcagagtctggcctggaactaaaatgcctggaaaaatgggaaacatatacaggacagaatatggactgaaagtgtggagaataaacacaaagcacaacataatctatgtaaatggctctgtacctggacataaaaattgcttagtaaaggtcaaagattctaaactgcctgcatataaggatctcggtaaaaatctaccattccctacatattttcctgatggagatgaagaggaactgccagaagatttgtatgatgaaaacgtgtgtcagcccggtgcgccttctattacatttgcctaacatctttggacgtggcagaaccttacatattctgtgagcttcgatgagccagagtgatatcataaccaccagaaatcatactctcctttcttagtcacaacaaaatcacacatgtcatctttgtcaagggcataaatatatcattcatacccccattaaattttgttagaaaaattaccacattaaatatatgagttaagtagattggatttgctgaaattggtgttgggcatattagcaaaatattcttaatttgtggactcgattcttttttactacatatttcccaagttatcttaagatgtctgtaaatttaacttttattaaagttttgtcaatctttgtgaaatagtggttgtggaacagtagaaaaccatatggggactatagtgcaacctatttgggtaaagaaaccatttgctaaaatggagaaagtaaatagatttttatttaaattacagaaacatgttaaaggccggacaaaggaaagacaataaaatcggca

SEQ ID NO: 137 - DNA, 8846 bp, Homo sapiens
  misc_feature: Incyte ID No: 383376.19
gggtggttggtggatgtcacagcttgggctttatctcccccagcagtggggactccacagcccctgggctacataacagcaagacagtccggagctgtagcagacctgattgagcctttgcagcagctgagagcatggcctagggtgggcggcaccattgtccagcagctgagtttcccagggaccttggagatagccgcagccctcatttgcaggggaagatgattcctgccagatttgccggggtgctgcttgctctggccctcattttgccagggaccctttgtgcagaaggaactcgcggcaggtcatccacggcccgatgcagccttttcggaagtgacttcgttaacacctttgatgggagcatgtacagctttgcgggatactgcagttacctcctggcagggggctgccagaaacgctccttctcgattattggggacttccagaatggcaagagagtgagcctctccgtgtatcttggggaattttttgacatccatttgtttgtcaatggtaccgtgacacagggggaccaaagagtctccatgccctatgcctccaaagggctgtatctagaaactgaggctgggtactacaagctgtccggtgaggcctatggctttgtggccaggatcgatggcagcggcaactttcaagtcctgctgtcagacagatacttcaacaagacctgcgggctgtgtggcaactttaacatctttgctgaagatgactttatgacccaagaagggaccttgacctcggacccttatgactttgccaactcatgggctctgagcagtggagaacagtggtgtgaacgggcatctcctcccagcagctcatgcaacatctcctctggggaagtgcagaagggcctgtgggagcagtgccagcttctgaagagcacctcggtgtttgcctgctgccaccctctggtggaccccgagccttttgtggccctgtgtgagaagactttgtgtgagtgtgctggggggctggagtgcgcctgccctgcccttctggagtacgcccggacctgtgcccaggagggaatggtgctgtacggctggaccgaccacagcgcgtgcagcccagtgtgccctgctggtatggagtataggcagtgtgtgtccccttgcgccaggacctgccagagcctgcacatcaatgaaatgtgtcaggagcgatgcgtggatggctgcagctgccctgagggacagctcctggatgaaggcctctgcgtggagagcaccgagtgtccctgcgtgcattccggaaagcgctaccctcccggcacctccctctctcgagactgcaacacctgcatttgccgaaacagccagtggatctgcagcaatgaagaatgtccaggggagtgccttgtcacaggtcaatcacacttcaagagctttgacaacagatacttcaccttcagtgggatctgccagtacctgctggcccgggattgccaggaccactccttctccattgtcattgagactgtccagtgtgctgatgaccgcgacgctgtgtgcacccgctccgtcaccgtccggctgcctggcctgcacaacagccttgtgaaactgaagcatggggcaggagttgccatggatggccaggacgtccagctccccctcctgaaaggtgacctccgcatccagcgtacagtgacggcctccgtgcgcctcagctacggggaggacctgcagatggactgggatggccgcgggaggctgctggtgaagctgtcccccgtctatgccgggaagacctgcggcctgtgtgggaattacaatggcaaccagggcgacgacttccttaccccctctgggctggcggagccccgggtggaggacttcgggaacgcctggaagctgcacggggactgccaggacctgcagaagcagcacagcgatccctgcgccctcaacccgcgcatgaccaggttctccgaggaggcgtgcgcggtcctgacgtcccccacattcgaggcctgccatcgtgccgtcagcccgctgccctacctgcggaactgccgctacgacgtgtgctcctgctcggacggccgcgagtgcctgtgcggcgccctggccagctatgccgcggcctgcgcggggagaggcgtgcgcgtcgcgtggcgcgagccaggccgctgtgagctgaactgcccgaaaggccaggtgtacctgcagtgcgggaccccctgcaacctgacctgccgctctctctcttacccggatgaggaatgcaatgaggcctgcctggagggctgcttctgccccccagggctctacatggatgagaggggggactgcgtgcccaaggcccagtgcccctgttactatgacggtgagatcttccagccagaagacatcttctcagaccatcacaccatgtgctactgtgaggatggcttcatgcactgtaccatgagtggagtccccggaagcttgctgcctgacgctgtcctcagcagtcccctgtctcatcgcagcaaaaggagcctatcctgtcggccccccatggtcaagctggtgtgtcccgctgacaacctgcgggctgaagggctcgagtgtaccaaaacgtgccagaactatgacctggagtgcatgagcatgggctgtgtctctggctgcctctgccccccgggcatggtccggcatgagaacagatgtgtggccctggaaaggtgtccctgcttccatcagggcaaggagtatgcccctggagaaacagtgaagattggctgcaacacttgtgtctgtcgggaccggaagtggaactgcacagaccatgtgtgtgatgccacgtgctccacgatcggcatggcccactacctcaccttcgacgggctcaaatacctgttccccggggagtgccagtacgttctggtgcaggattactgcggcagtaaccctgggacctttcggatcctagtggggaataagggatgcagccacccctcagtgaaatgcaagaaacgggtcaccatcctggtggagggaggagagattgagctgtttgacggggaggtgaatgtgaagaggcccatgaaggatgagactcactttgaggtggtggagtctggccggtacatcattctgctgctgggcaaagccctctccgtggtctgggaccgccacctgagcatctccgtggtcctgaagcagacataccaggagaaagtgtgtggcctgtgtgggaattttgatggcatccagaacaatgacctcaccagcagcaacctccaagtggaggaagaccctgtggactttgggaactcctggaaagtgagctcgcagtgtgctgacaccagaaaagtgcctctggactcatcccctgccacctgccataacaacatcatgaagcagacgatggtggattcctcctgtagaatccttaccagtgacgtcttccaggactgcaacaagctggtggaccccgagccatatctggatgtctgcatttacgacacctgctcctgtgagtccattggggactgcgcctgcttctgcgacaccattgctgcctatgcccacgtgtgtgcccagcatggcaaggtggtgacctggaggacggccacattgtgcccccagagctgcgaggagaggaatctccgggagaacgggtatgagtgtgagtggcgctataacagctgtgcacctgcctgtcaagtcacgtgtcagcaccctgagccactggcctgccctgtgcagtgtgtggagggctgccatgcccactgccctccagggaaaatcctggatgagcttttgcagacctgcgttgaccctgaagactgtccagtgtgtgaggtggctggccggcgttttgcctcaggaaagaaagtcaccttgaatcccagtgaccctgagcactgccagatttgccactgtgatgttgtcaacctcacctgtgaagcctgccaggagccgggaggcctggtggtgcctcccacagatgccccggtgagccccaccactctgtatgtggaggacatctcggaaccgccgttgcacgatttctactgcagcaggctactggacctggtcttcctgctggatggctcctccaggctgtccgaggctgagtttgaagtgctgaaggcctttgtggtggacatgatggagcggctgcgcatctcccagaagtgggtccgcgtggccgtggtggagtaccacgacggctcccacgcctacatcgggctcaaggaccggaagcgaccatcagagctgcggcgcattgccagccaggtgaagtatgcgggcagccaggtggcctccaccagcgaggtcttgaaatacacactgttccaaatcttcagcaagatcgaccgccctgaagcctcccgcatcgccctgctcctgatggccagccaggagccccaacggatgtcccggaactttgtccgctacgtccagggcctgaagaagaagaaggtcattgtgatcccggtgggcattgggccccatgccaacctcaagcagatccgcctcatcgagaagcaggcccctgagaacaaggccttcgtgctgagcagtgtggatgagctggagcagcaaagggacgagatcgttagctacctctgtgaccttgcccctgaagcccctcctcctactctgcccccccacatggcacaagtcactgtgggcccggggctcttgggggtttcgaccctggggcccaagaggaactccatggttctggatgtggcgttcgtcctggaaggatcggacaaaattggtgaagccgacttcaacaggagcaaggagttcatggaggaggtgattcagcggatggatgtgggccaggacagcatccacgtcacggtgctgcagtactcctacatggtgaccgtggagtaccccttcagcgaggcacagtccaaaggggacatcctgcagcgggtgcgagagatccgctaccagggcggcaacaggaccaacactgggctggccctgcggtacctctctgaccacagcttcttggtcagccagggtgaccgggagcaggcgcccaacctggtctacatggtcaccggaaatcctgcctctgatgagatcaagaggctgcctggagacatccaggtggtgcccattggagtgggccctaatgccaacgtgcaggagctggagaggattggctggcccaatgcccctatcctcatccaggactttgagacgctcccccgagaggctcctgacctggtgctgcagaggtgctgctccggagaggggctgcagatccccaccctctcccctgcacctgactgcagccagcccctggacgtgatccttctcctggatggctcctccagtttcccagcttcttattttgatgaaatgaagagtttcgccaaggctttcatttcaaaagccaatatagggcctcgtctcactcaggtgtcagtgctgcagtatggaagcatcaccaccattgacgtgccatggaacgtggtcccggagaaagcccatttgctgagccttgtggacgtcatgcagcgggagggaggccccagccaaatcggggatgccttgggctttgctgtgcgatacttgacttcagaaatgcatggtgccaggccgggagcctcaaaggcggtggtcatcctggtcacggacgtctctgtggattcagtggatgcagcagctgatgccgccaggtccaacagagtgacagtgttccctattggaattggagatcgctacgatgcagcccagctacggatcttggcaggcccagcaggcgactccaacgtggtgaagctccagcgaatcgaagacctccctaccatggtcaccttgggcaattccttcctccacaaactgtgctctggatttgttaggatttgcatggatgaggatgggaatgagaagaggcccggggacgtctggaccttgccagaccagtgccacaccgtgacttgccagccagatggccagaccttgctgaagagtcatcgggtcaactgtgaccgggggctgaggccttcgtgccctaacagccagtcccctgttaaagtggaagagacctgtggctgccgctggacctgcccctgtgtgtgcacaggcagctccactcggcacatcgtgacctttgatgggcagaatttcaagctgactggcagctgttcttatgtcctatttcaaaacaaggagcaggacctggaggtgattctccataatggtgcctgcagccctggagcaaggcagggctgcatgaaatccatcgaggtgaagcacagtgccctctccgtcgagctgcacagtgacatggaggtgacggtgaatgggagactggtctctgttccttacgtgggtgggaacatggaagtcaacgtttatggtgccatcatgcatgaggtcagattcaatcaccttggtcacatcttcacattcactccacaaaacaatgagttccaactgcagctcagccccaagacttttgcttcaaagacgtatggtctgtgtgggatctgtgatgagaacggagccaatgacttcatgctgagggatggcacagtcaccacagactggaaaacacttgttcaggaatggactgtgcagcggccagggcagacgtgccagcccatcctggaggagcagtgtcttgtccccgacagctcccactgccaggtcctcctcttaccactgtttgctgaatgccacaaggtcctggctccagccacattctatgccatctgccagcaggacagttgccaccaggagcaagtgtgtgaggtgatcgcctcttatgcccacctctgtcggaccaacggggtctgcgttgactggaggacacctgatttctgtgctatgtcatgcccaccatctctggtctacaaccactgtgagcatggctgtccccggcactgtgatggcaacgtgagctcctgtggggaccatccctccgaaggctgtttctgccctccagataaagtcatgttggaaggcagctgtgtccctgaagaggcctgcactcagtgcattggtgaggatggagtccagcaccagttcctggaagcctgggtcccggaccaccagccctgtcagatctgcacatgcctcagcgggcggaaggtcaactgcacaacgcagccctgccccacggccaaagctcccacgtgtggcctgtgtgaagtagcccgcctccgccagaatgcagaccagtgctgccccgagtatgagtgtgtgtgtgacccagtgagctgtgacctgcccccagtgcctcactgtgaacgtggcctccagcccacactgaccaaccctggcgagtgcagacccaacttcacctgcgcctgcaggaaggaggagtgcaaaagagtgtccccaccctcctgccccccgcaccgtttgcccacccttcggaagacccagtgctgtgatgagtatgagtgtgcctgcaactgtgtcaactccacagtgagctgtccccttgggtacttggcctcaaccgccaccaatgactgtggctgtaccacaaccacctgccttcccgacaaggtgtgtgtccaccgaagcaccatctaccctgtgggccagttctgggaggagggctgcgatgtgtgcacctgcaccgacatggaggatgccgtgatgggcctccgcgtggcccagtgctcccagaagccctgtgaggacagctgtcggtcgggcttcacttacgttctgcatgaaggcgagtgctgtggaaggtgcctgccatctgcctgtgaggtggtgactggctcaccgcggggggactcccagtcttcctggaagagtgtcggctcccagtgggcctccccggagaacccctgcctcatcaatgagtgtgtccgagtgaaggaggaggtctttatacaacaaaggaacgtctcctgcccccagctggaggtccctgtctgcccctcgggctttcagctgagctgtaagacctcagcgtgctgcccaagctgtcgctgtgagcgcatggaggcctgcatgctcaatggcactgtcattgggcccgggaagactgtgatgatcgatgtgtgcacgacctgccgctgcatggtgcaggtgggggtcatctctggattcaagctggagtgcaggaagaccacctgcaacccctgccccctgggttacaaggaagaaaataacacaggtgaatgttgtgggagatgtttgcctacggcttgcaccattcagctaagaggaggacagatcatgacactgaagcgtgatgagacgctccaggatggctgtgatactcacttctgcaaggtcaatgagagaggagagtacttctgggagaagagggtcacaggctgcccaccctttgatgaacacaagtgtctggctgagggaggtaaaattatgaaaattccaggcacctgctgtgacacatgtgaggagcctgagtgcaacgacatcactgccaggctgcagtatgtcaaggtgggaagctgtaagtctgaagtagaggtggatatccactactgccagggcaaatgtgccagcaaagccatgtactccattgacatcaacgatgtgcaggaccagtgctcctgctgctctccgacacggacggagcccatgcaggtggccctgcactgcaccaatggctctgttgtgtaccatgaggttctcaatgccatggagtgcaaatgctcccccaggaagtgcagcaagtgaggctgctgcagctgcatgggtgcctgctgctgcctgcctgccttggcctgatggccaggccagagtgctgccagtcctctgcatgttctgctcttgtgcccttctgagcccacaataaaggctgagctcttattgtgggctcagaaggggacaagagcagaacatgcagagtgctgccagtcc

SEQ ID NO: 138 - DNA, 1645 bp, Homo sapiens
  misc_feature: Incyte ID No: 1382961.3
cctttccaatttacccgagcaccttctcttcactcagccaactgctcgctcgctcacctccctcctctgcaccatgactacctgcagccgccagttcacctcctccagctccatgaagggctcctgcggcatcgggggcggcatcgggggcggctccagccgcatctcctccgtcctggccggagggtcctgccgcgcccccagcacctacgggggcggcctgtctgtctcatcctcccgcttctcctctgggggagcctatgggttggggggcggctatggcggtggcttcagcagcagaaccagcagctttggtagtggctttgggggaggatatggtggtggccttggtgctggcttgggtggtggctttggtggtggctttgctggtggtgatgggcttctggtgggcagtgagaaggtgaccatgcagaacctcaacgaccgcctggcctcctacctggacaaggtgcgtgctctggaggaggccaacgccgacctggaagtgaagatccgtgactggtaccagaggcagcggcctgctgagatcaaagactacagtccctacttcaagaccattgaggacctgaggaacaagattctcacagccacagtggacaatgccaatgtccttctgcagattgacaatgcccgtctggccgcggatgacttccgcaccaagtatgagacagagttgaacctgcgcatgagtgtggaagccgacatcaatggcctgcgcagggtgctggacgaactgaccctggccagagctgacctggagatgcagattgagagcctgaaggaggagctggcctacctgaagaagaaccacgaggaggagatgaatgccctgagaggccaggtgggtggagatgtcaatgtggagatggacgctgcacctggcgtggacctgagccgcattctgaacgagatgcgtgaccagtatgagaagatggcagagaagaaccgcaaggatgccgaggaatggttcttcaccaagacagaggagctgaaccgcgaggtggccaccaacagcgagctggtgcagagcggcaagagcgagatctcggagctccggcgcaccatgcagaacctggagattgagctgcagtcccagctcagcatgaaagcatccctggagaacagcctggaggagaccaaaggtcgctactgcatgcagctggcccagatccaggagatgattggcagcgtggaggagcagctggcccagctccgctgcgagatggagcagcagaaccaggagtacaagatcctgctggacgtgaagacgcggctggagcaggagatcgccacctaccgccgcctgctggagggcgaggacgcccacctctcctcctcccagttctcctctggatcgcagtcatccagagatgtgacctcctccagccgccaaatccgcaccaaggtcatggatgtgcacgatggcaaggtggtgtccacccacgagcaggtccttcgcaccaagaactgaggctgcccagccccgctcaggcctaggaggccccccgtgtggacacagatcccactggaagatcccctctcctgcccaagcacttcacagctggaccctgcttcaccctcaccccctcctggcaatcaatacagcttcattatctgagttgca

SEQ ID NO: 139 - DNA, 1804 bp, Homo sapiens
  misc_feature: Incyte ID No: 1382961.15
ttccctaatgcaataaggctctatgggccagcagtggctccagcagggaggccaggaccatgctggagctttcaggaccctgtgcctgcctcctgccgccgccaccatgaccacctccatccgccagttcacctcctccagctccatcaagggctcctccggcctggggggcggctcgtcccgcacctcctgccggctgtctggcggcctgggtgccggctcctgcaggctgggatctgctggcggcctgggcagcaccctcgggggtagcagctactccagctgctacagctttggctctggtggtggctatggcagcagctttgggggtgttgatgggctgctggctggaggtgagaaggccaccatgcagaacctcaatgaccgcctggcctcctacctggacaaggtgcgtgccctggaggaggccaacactgagctggaggtgaagatccgtgactggtaccagaggcaggccccggggcccgcccgtgactacagccagtactacaggacaattgaggagctgcagaacaagatcctcacagccaccgtggacaatgccaacatcctgctacagattgacaatgcccgtctggctgctgatgacttccgcaccaagtttgagacagagcaggccctgcgcctgagtgtggaggccgacatcaatggcctgcgcagggtgctggatgagctgaccctggccagagccgacctggagatgcagattgagaacctcaaggaggagctggcctacctgaagaagaaccacgaggaggagatgaacgccctgcgaggccaggtgggtggtgagatcaatgtggagatggacgctgccccaggcgtggacctgagccgcatcctcaacgagatgcgtgaccagtatgagaagatggcagagaagaaccgcaaggatgccgaggattggttcttcagcaagacagaggaactgaaccgcgaggtggccaccaacagtgagctggtgcagagtggcaagagtgagatctcggagctccggcgcaccatgcaggccttggagatagagctgcagtcccagctcagcatgaaagcatccctggagggcaacctggcggagacagagaaccgctactgcgtgcagctgtcccagatccaggggctgattggcagcgtggaggagcagctggcccagcttcgctgcgagatggagcagcagaaccaggaatacaaaatcctgctggatgtgaagacgcggctggagcaggagattgccacctaccgccgcctgctggagggagaggatgcccacctgactcagtacaagaaagaaccggtgaccacccgtcaggtgcgtaccattgtggaagaggtccaggatggcaaggtcatctcctcccgcgagcaggtccaccagaccacccgctgaggactcagctaccccggccggccacccaggaggcagggaggcagccgccccatctgccccacagtctccggcctctccagcctcagccccctgcttcagtcccttccccatgcttccttgcctgatgacaataaagcttgttgactcagctaaaaaaaaaaaaaaggtcagggaccctctgcctctggcagccttaacctgtcctctgctaggaccagggtgatttcaagccagggaagcaactgggaccctgaaaactgtccctccccagcccgctccccctctctgtgccctggtccccttgctgccatgtggatgctgttgtgattgctgtttgtatattatcaaaatgtttttatattaaaaatgtttggtctgaaaattaaaagcacttcattt

SEQ ID NO: 140 - DNA, 1511 bp, Homo sapiens
  misc_feature: Incyte ID No: 1454852CB1
cccctctcctccccagcccttctcctgtgtgcctgcctcctgctgccctcaccatgaccacctccatccgccagttcacctcctccagctccatcaagggctcctccggcctggggggcggctcgtcccgcacctcctgccggctgtctggcggcctgggtgccggctcctgcaggctgggatctgctggcggcctgggcagcaccctcgggggtagcagctactccagctgctacagctttggctctggtggtggctatggcagcagctttgggggtgttgatgggctgctggctggaggtgagaaggccaccatgcagaacctcaatgaccgcctggcctcctacctggacaaggtgcgtgccctggaggaggccaacactgagctggaggtgaagatccgtgactggtaccagaggcaggccccggggcccgcccgtgactacagccagtactacaggacaattgaggagctgcagaacaagatcctcacagccaccgtggacaatgccaacatcctgctacagattgacaatgcccgtctggctgctgatgacttccgcaccaagtttgagacagagcaggccctgcgcctgagtgtggaggccgacatcaatggcctgcgcagggtgctggatgagctgaccctggccagagccgacctggagatgcagattgagaacctcaaggaggagctggcctacctgaagaagaaccacgaggaggagatgaacgccctgcgaggccaggtgggtggtgagatcaatgtggagatggacgctgccccaggcgtggacctgagccgcatcctcaacgagatgcgtgaccagtatgagaagatggcagagaagaaccgcaaggatgccgaggattggttcttcagcaagacagaggaactgaaccgcgaggtggccaccaacagtgagctggtgcagagtggcaagagtgagatctcggagctccggcgcaccatgcaggccttggagatagagctgcagtcccagctcagcatgaaagcatccctggagggcaacctggcggagacagagaaccgctactgcgtgcagctgtcccagatccaggggctgattggcagcgtggaggagcagctggcccagcttcgctgcgagatggagcagcagaaccaggaatacaaaatcctgctggatgtgaagacgcggctggagcaggagattgccacctaccgccgcctgctggagggagaggatgcccacctgactcagtacaagaaagaaccggtgaccacccgtcaggtgcgtaccattgtggaagaggtccaggatggcaaggtcatctcctcccgcgagcaggtccaccagaccacccgctgaggactcagctaccccggccggccacccaggaggcagggaggcagccgccccatctgccccacagtctccggcctctccagcctcagccccctgcttcagtcccttccccatgcttccttgcctgatgacaataaagcttgttgactcagctaaaaaaaa

SEQ ID NO: 141 - DNA, 3887 bp, Homo sapiens
  misc_feature: Incyte ID No: 2161632CB1
  unsure 3873: a, t, c, g, or other
gggaaaagagtaaacgcgcgactccagcgcgcggctacctacgcttggtgcttgctttctccagccatcggagaccagagccgccccctctgctcgagaaaggggctcagcggcggcggaagcggagggggaccaccgtggagagcgcggtcccagcccggccactgcggatccctgaaaccaaaaagctcctgctgcttctgtaccccgcctgtccctcccagctgcgcagggccccttcgtgggatcatcagcccgaagacagggatggagaggcctctgtgctcccacctctgcagctgcctggctatgctggccctcctgtcccccctgagcctggcacagtatgacagctggccccattaccccgagtacttccagcaaccggctcctgagtatcaccagccccaggcccccgccaacgtggccaagattcagctgcgcctggctgggcagaagaggaagcacagcgagggccgggtggaggtgtactatgatggccagtggggcaccgtgtgcgatgacgacttctccatccacgctgcccacgtcgtctgccgggagctgggctacgtggaggccaagtcctggactgccagctcctcctacggcaagggagaagggcccatctggttagacaatctccactgtactggcaacgaggcgacccttgcagcatgcacctccaatggctggggcgtcactgactgcaagcacacggaggatgtcggtgtggtgtgcagcgacaaaaggattcctgggttcaaatttgacaattcgttgatcaaccagatagagaacctgaatatccaggtggaggacattcggattcgagccatcctctcaacctaccgcaagcgcaccccagtgatggagggctacgtggaggtgaaggagggcaagacctggaagcagatctgtgacaagcactggacggccaagaattcccgcgtggtctgcggcatgtttggcttccctggggagaggacatacaataccaaagtgtacaaaatgtttgcctcacggaggaagcagcgctactggccattctccatggactgcaccggcacagaggcccacatctccagctgcaagctgggcccccaggtgtcactggaccccatgaagaatgtcacctgcgagaatgggctaccggccgtggtgagttgtgtgcctgggcaggtcttcagccctgacggaccctcgagattccggaaagcgtacaagccagagcaacccctggtgcgactgagaggcggtgcctacatcggggagggccgcgtggaggtgctcaaaaatggagagtgggggaccgtctgcgacgacaagtgggacctggtgtcggccagtgtggtctgcagagagctgggctttgggagtgccaaagaggcagtcactggctcccgactggggcaagggatcggacccatccacctcaacgagatccagtgcacaggcaatgagaagtccattatagactgcaagttcaatgccgagtctcagggctgcaaccacgaggaggatgctggtgtgagatgcaacacccctgccatgggcttgcagaagaagctgcgcctgaacggcggccgcaatccctacgagggccgagtggaggtgctggtggagagaaacgggtcccttgtgtgggggatggtgtgtggccaaaactggggcatcgtggaggccatggtggtctgccgccagctgggcctgggattcgccagcaacgccttccaggagacctggtattggcacggagatgtcaacagcaacaaagtggtcatgagtggagtgaagtgctcgggaacggagctgtccctggcgcactgccgccacgacggggaggacgtggcctgcccccagggcggagtgcagtacggggccggagttgcctgctcagaaaccgcccctgacctggtcctcaatgcggagatggtgcagcagaccacctacctggaggaccggcccatgttcatgctgcagtgtgccatggaggagaactgcctctcggcctcagccgcgcagaccgaccccaccacgggctaccgccggctcctgcgcttctcctcccagatccacaacaatggccagtccgacttccggcccaagaacggccgccacgcgtggatctggcacgactgtcacaggcactaccacagcatggaggtgttcacccactatgacctgctgaacctcaatggcaccaaggtggcagagggccacaaggccagcttctgcttggaggacacagaatgtgaaggagacatccagaagaattacgagtgtgccaacttcggcgatcagggcatcaccatgggctgctgggacatgtaccgccatgacatcgactgccagtgggttgacatcactgacgtgccccctggagactacctgttccaggttgttattaaccccaacttcgaggttgcagaatccgattactccaacaacatcatgaaatgcaggagccgctatgacggccaccgcatctggatgtacaactgccacataggtggttccttcagcgaagagacggaaaaaaagtttgagcacttcagcgggctcttaaacaaccagctgtccccgcagtaaagaagcctgcgtggtcaactcctgtcttcaggccacaccacatcttccatgggacttccccccaacaactgagtctgaacgaatgccacgtgccctcacccagcccggcccccaccctgtccagacccctacagctgtgtctaagctcaggaggaaagggaccctcccatcattcatggggggctgctacctgacccttggggcctgagaaggccttgggggggtggggtttgtccacagagctgctggagcagcaccaagagccagtcttgaccgggatgaggcccacagacaggttgtcatcagcttgtcccattcaagccaccgagctcaccacagacacagtggagccgcgctcttctccagtgacacgtggacaaatgcgggctcatcagcccccccagagagggtcaggccgaaccccatttctcctcctcttaggtcattttcagcaaacttgaatatctagacctctcttccaatgaaaccctccagtctattatagtcacatagataatggtgccacgtgttttctgatttggtgagctcagacttggtgcttccctctccacaacccccaccccttgtttttcaagatactattattatattttcacagacttttgaagcacaaatttattggcatttaatattggacatctgggcccttggaagtacaaatctaaggaaaaaccaacccactgtgtaagtgactcatcttcctgttgttccaattctgtgggtttttgattcaacggtgctataaccagggtcctgggtgacagggcgctcactgagcaccatgtgtcatcacagacacttacacatacttgaaacttggaataaaagaaagatttatgaaacgtgtctgtgtttcctttgacccacagcacctgggccctgagcagcaggcttcctatgttcagtggccagaagcagagcttcaggtacattcatggttttctccggtggacatgggtcctcagatcccctccagcccagtgtggccaccagggcacctccttcaatagactccaaaaggggcagctcctaccatctgggagaagcagtctaaggagatcacaaaaagtaacggaacaggagtcataatctttcttgaactcctgtggtttttactgaaacttgtcagaaggcataggagttgtgcgagggctggatgggaagtctagatttaaacagccaccaggcagcttatcaaagcaagagggcatccgttcacaggacaggggctccagcaattccagtggcagtggtggttgnggtttggctggccc

SEQ ID NO: 142 - DNA, 3012 bp, Homo sapiens
  misc_feature: Incyte ID No: 2058013CB1
ctctagtcctcgtggttgcctgccccactccctgccgagacgcctgccagaaaggtcacctatcctgaaccccagcaagcctgaaacagctcagccaagcaccctgcgatggaagctgcagatgcctccaggagcaacgggtcgagcccagaagccagggatgcccggagcccgtcgggccccagtggcagcctggagaatggcaccaaggctgacggcaaggatgccaagaccaccaacgggcacggcggggaggcagctgagggcaagagcctgggcagcgccctgaagccaggggaaggtaggagcgccctgttcgcgggcaatgagtggcggcgacccatcatccagtttgtcgagtccggggacgacaagaactccaactacttcagcatggactctatggaaggcaagaggtcgccgtacgcagggctccagctgggggctgccaagaagccacccgttacctttgccgaaaagggcgacgtgcgcaagtccattttctcggagtcccggaagcccacggtgtccatcatggagcccggggagacccggcggaacagctacccccgggccgacacgggccttttttcacggtccaagtccggctccgaggaggtgctgtgcgactcctgcatcggcaacaagcagaaggcggtcaagtcctgcctggtgtgccaggcctccttctgcgagctgcatctcaagccccacctggagggcgccgccttccgagaccaccagctgctcgagcccatccgggactttgaggcccgcaagtgtcccgtgcatggcaagacgatggagctcttctgccagaccgaccagacctgcatctgctacctttgcatgttccaggagcacaagaatcatagcaccgtgacagtggaggaggccaaggccgagaaggagacggagctgtcactgcaaaaggagcagctgcagctcaagatcattgagattgaggatgaagctgagaagtggcagaaggagaaggaccgcatcaagagcttcaccaccaatgagaaggccatcctggagcagaacttccgggacctggtgcgggacctggagaagcaaaaggaggaagtgagggctgcgctggagcagcgggagcaggatgctgtggaccaagtgaaggtgatcatggatgctctggatgagagagccaaggtgctgcatgaggacaagcagacccgggagcagctgcatagcatcagcgactctgtgttgtttctgcaggaatttggtgcattgatgagcaattactctctccccccacccctgcccacctatcatgtcctgctggagggggagggcctgggacagtcactaggcaacttcaaggacgacctgctcaatgtatgcatgcgccacgttgagaagatgtgcaaggcggacctgagccgtaacttcattgagaggaaccacatggagaacggtggtgaccatcgctatgtgaacaactacacgaacagcttcgggggtgagtggagtgcaccggacaccatgaagagatactccatgtacctgacacccaaaggtggggtccggacatcataccagccctcgtctcctggccgcttcaccaaggagaccacccagaagaatttcaacaatctctatggcaccaaaggtaactacacctcccgggtctgggagtactcctccagcattcagaactctgacaatgacctgcccgtcgtccaaggcagctcctccttctccctgaaaggctatccctccctcatgcggagccaaagccccaaggcccagccccagacttggaaatctggcaagcagactatgctgtctcactaccggccattctacgtcaacaaaggcaacgggattgggtccaacgaagccccatgagctcctggcggaaggaacgaggcgccacacccctgctcttcctcctgaccctgctgctcttgccttctaagctactgtgcttgtctgggtgggagggagcctggtcctgcacctgccctctgcagccctctgccagcctcttgggggcagttccggcctctccgacttccccactggccacactccattcagactcctttcctgccttgtgacctcagatggtcaccatcattcctgtgctcagaggccaacccatcacaggggtgagataggttggggcctgccctaacccgccagcctcctcctctcgggctggatctgggggctagcagtgagtacccgcatggtatcagcctgcctctcccgcccacgccctgctgtctccaggcctatagacgtttctctccaaggccctatcccccaatgttgtcagcagatgcctggacagcacagccacccatctcccattcacatggcccacctcctgcttcccagaggactggccctacgtgctctctctcgtcctacctatcaatgcccagcatggcagaacctgcagcccttggccactgcagatggaaacctctcagtgtcttgacatcaccctacccaggcggtgggtctccaccacagccactttgagtctgtggtccctggagggtggcttctcctgactggcaggatgaccttagccaagatattcctctgttccctctgctgagataaagaattcccttaacatgatataatccacccatgcaaatagctactggcccagctaccatttaccatttgcctacagaatttcattcagtctacactttggcattctctctggcgatggagtgtggctgggctgaccgcaaaaggtgccttacacactgcccccaccctcagccgttgccccatcagaggctgcctcctccttctgattaccccccatgttgcatatcagggtgctcaaggattggagaggagacaaaaccaggagcagcacagtggggacatctcccgtctcaacagccccaggcctatgggggctctggaaggatgggccagcttgcaggggttggggagggagacatccagcttgggctttcccctttggaataaaccattggtctgtcaaaaaaaaaa

SEQ ID NO: 143 - DNA, 4371 bp, Homo sapiens
  misc_feature: Incyte ID No: 235333.1
ccgccctgaggggctgggagcggcgcgggggtgggtcccggtcctgcagccccagcgaggggcgagcggcggccagtcggcgagctgggcaataaggaaacggtttattaggagggagtggtggagctgggccaggcaggaagacgctggaataagaaacatttttgctccagcccccatcccagtcccgggaggctgccgcgccagctgcgccgagcgagcccctccccggctccagcccggtccggggccgcgcccggaccccagcccgccgtccagcgctggcggtgcaactgcggccgcgcggtggaggggaggtggccccggtccgccgaaggctagcgccccgccacccgcagagcgggcccagagggaccatgaccttgggctcccccaggaaaggccttctgatgctgctgatggccttggtgacccagggagaccctgtgaagccgtctcggggcccgctggtgacctgcacgtgtgagagcccacattgcaaggggcctacctgccggggggcctggtgcacagtagtgctggtgcgggaggaggggaggcacccccaggaacatcggggctgcgggaacttgcacagggagctctgcagggggcgccccaccgagttcgtcaaccactactgctgcgacagccacctctgcaaccacaacggtgtccctggtgctggaggccacccaacctccttcggagcagccgggaacagatggccagctggccctgatcctgggccccgtgctggccttgctggccctggtggccctgggtgtcctgggcctgtggcatgtccgacggaggcaggagaagcagcgtggcctgcacagcgagctgggagagtccagtctcatcctgaaagcatctgagcagggcgacagcatgttgggggacctcctggacagtgactgcaccacagggagtggctcagggctccccttcctggtgcagaggacagtggcacggcaggttgccttggtggagtgtgtgggaaaaggccgctatggcgaagtgtggcggggcttgtggcacggtgagagtgtggccgtcaagatcttctcctcgagggatgaacagtcctggttccgggagactgagatctataacacagtgttgctcagacacgacaacatcctaggcttcatcgcctcagacatgacctcccgcaactcgagcacgcagctgtggctcatcacgcactaccacgagcacggctccctctacgactttctgcagagacagacgctggagccccatctggctctgaggctagctgtgtccgcggcatgcggcctggcgcacctgcacgtggagatcttcggtacacagggcaaaccagccattgcccaccgcgacttcaagagccgcaatgtgctggtcaagagcaacctgcagtgttgcatcgccgacctgggcctggctgtgatgcactcacagggcagcgattacctggacatcggcaacaacccgagagtgggcaccaagcggtacatggcacccgaggtgctggacgagcagatccgcacggactgctttgagtcctacaagtggactgacatctgggcctttggcctggtgctgtgggagattgcccgccggaccatcgtgaatggcatcgtggaggactatagaccacccttctatgatgtggtgcccaatgaccccagctttgaggacatgaagaaggtggtgtgtgtggatcagcagacccccaccatccctaaccggctggctgcagacccggtcctctcaggcctagctcagatgatgcgggagtgctggtacccaaacccctctgcccgactcaccgcgctgcggatcaagaagacactacaaaaaattagcaacagtccagagaagcctaaagtgattcaatagcccaggagcacctgattcctttctgcctgcagggggctgggggggtggggggcagtggatggtgccctatctgggtagaggtagtgtgagtgtggtgtgtgctggggatgggcagctgcgcctgcctgctcggcccccagcccacccagccaaaaatacagctgggctgaaacctgatcccctgctgtctggcctgctcaaagcggcaggctccctgacgcctggctctctccccacccctatggccagcatggtgcaccccctaccactcccgggacaggatgcaaaagaggctccagagtcagagtgccaagccagggaatcccagtcccagactcagagcccgggcctgcactttgccccctgcccttgatcaaccccactgccccaccagagctgccagggtggcacagggccctgtccagcccctggcacacacttccctgccaggcctcagcctctagcataagctccagagagccagggcccatcagtttctctctgtggatttgtatctcagctccatgatgccttgggctttctgtctcctcaacaagagtgcagcttgctgaatgtcagctgcctgagagagctggggcctgacttactagggcattaaatcctaagaggtcctactgaggtgtggcaggatcacaggccagtggaaaaagggcaggtcagatgggcaaggcccaggactttcagattaactgagaggatatcgaggccaagcatggcagggggaaggtcagtgggtgtcaagagacccaggtctgaccccggatgtttgctccatgtgacaaaagcaggcctgtctcaggaccttttctttttcttttcttttttccttcttttttttttgacacggagtttggctcttgttgtccaggctagagtgcaatggcatgatcccagcttaccgcaacgtctacctcccaggttcaaatcattctcttgcctcagactcccgagtagctgggattacaggcacatgccaccatgcctggctaatttggtatatttagtagaaacagggtttcaccatgttggccatgctggtctcgaactcctgacctcaggtgttccacctacctcagcctcccaaagtgctggggttacaggtgtgagccatcgcgcctggccaaggacctttgtttcttatctacatattggaagatttggtcctgatgtcctttgaggcttctttagctctagttctctgacacttcagcctatatcacagctaacttcctcagtctcatctattccttatgctccagcccctggcaatttgcctcaagatgggggtttgaaaataactttacctgactcaaggagtgtctggagcacctcctagtctaagtctgcaagctccagttcttgcctaaaaccatgccagtggccacccttgggctcagacagctctgggccttttgaccacaagccagcccctcgccctctctgtggcatagtcttctctgccccaggactgcagggcggcttcctccaaggcttccaaggctcaaaagaaatttggctccatccaagaaggctccagctcccctactggcccctggctcaggcccacacccctggccaggcccagagagtgtgtctcaggagaattcaatggctctagagagacacacagaaagtttggcatttggaaatttcaaggatgtatgtatgctcacgtatggagcaggttgtcctggtccctgggtgcagggaagtgggctgcagggaagtggattggaggggagcttgaggaatataaggagcgggggtggagactcaggctatggacaaggacagccccaaggttgggaagacctggccttagtcgtcctcagcctaggggcagggcagtgaagaaagctctccccgctcctgctgtaatgacccagagtagcctccccaggccggcatctcatgtgtgtcttccaccatcctcatggtggcacttttctaggcctgtctcccagcattgtgcaaggctcggaagagaaccaggaagtgaaactgggtgaaaacagaaagctcaatggatgggctaggttcccagatcattagggcagagtttgcacgtcctctggtcactggaatccacccagcccacgaatcatctccctcttgaaggattttatttctactgggttttggaacaaactcctgctgagaccccacagccagaaactgaaagcagcagctccccaaagcctggaaaatccctaagagaaggcctggggcaggaagtggagtgacaggggacaggtagagagaagggggcccaatggccagggagtgaaggaggtggcgttgctgagagcagtctgcacatgcttctgtctgagtgcaggaaggtgttccagggtcgaaattacacttctcgtacctggagacgctgtttgtgggagcactgggctcatgcctggcacacaataggtctgcaataaaccatggttaaatcctgaaaaaaaa

SEQ ID NO: 144 - DNA, 2257 bp, Homo sapiens
  misc_feature: Incyte ID No: 702628CB1
gcggctggagtttgctgctgccgctgtgcagtttgttcaggggcttgtggtggtgagtccgagaggctgcgtgtgagagacgtgagaaggatcctgcactgaggaggtggaaagaagaggattgctcgaggaggcctggggtctgtgaggcagcggagctgggtgaaggctgcgggttccggcgaggcctgagctgtgctgtcgtcatgcctcaaacccgatcccaggcacaggctacaatcagttttccaaaaaggaagctgtctcgggcattgaacaaagctaaaaactccagtgatgccaaactagaaccaacaaatgtccaaaccgtaacctgttctcctcgtgtaaaagccctgcctctcagccccaggaaacgtctgggcgatgacaacctatgcaacactccccatttacctccttgttctccaccaaagcaaggcaagaaagagaatggtccccctcactcacatacacttaagggacgaagattggtatttgacaatcagctgacaattaagtctcctagcaaaagagaactagccaaagttcaccaaaacaaaatactttcttcagttagaaaaagtcaagagatcacaacaaattctgagcagagatgtccactgaagaaagaatctgcatgcgtgagactattcaagcaagaaggcacttgctaccagcaagcaaagctggtcctgaacacagctgtcccagatcggctgcctgccagggaaagggagatggatgtcatcaggaatttcttgagggaacacatctgtgggaaaaaagctggaagcctttacctttctggtgctcctggaactggaaaaactgcctgcttaagccggattctgcaagacctcaagaaggaactgaaaggctttaaaactatcatgctgaattgcatgtccttgaggactgcccaggctgtattcccagctattgctcaggagatttgtcaggaagaggtatccaggccagctgggaaggacatgatgaggaaattggaaaaacatatgactgcagagaagggccccatgattgtgttggtattggacgagatggatcaactggacagcaaaggccaggatgtattgtacacgctatttgaatggccatggctaagcaattctcacttggtgctgattggtattgctaataccctggatctcacagatagaattctacctaggcttcaagctagagaaaaatgtaagccacagctgttgaacttcccaccttataccagaaatcagatagtcactattttgcaagatcgacttaatcaggtatctagagatcaggttctggacaatgctgcagttcaattctgtgcccgcaaagtctctgctgtttcaggagatgttcgcaaagcactggatgtttgcaggagagctattgaaattgtagagtcagatgtcaaaagccagactattctcaaaccactgtctgaatgtaaatcaccttctgagcctctgattcccaagagggttggtcttattcacatatcccaagtcatctcagaagttgatggtaacaggatgaccttgagccaagaaggagcacaagattccttccctcttcagcagaagatcttggtttgctctttgatgctcttgatcaggcagttgaaaatcaaagaggtcactctggggaagttatatgaagcctacagtaaagtctgtcgcaaacagcaggtggcggctgtggaccagtcagagtgtttgtcactttcagggctcttggaagccaggggcattttaggattaaagagaaacaaggaaacccgtttgacaaaggtgtttttcaagattgaagagaaagaaatagaacatgctctgaaagataaagctttaattggaaatatcttagctactggattgccttaaattcttctcttacaccccacccgaaagtattcagctggcatttagagagctacagtcttcattttagtgctttacacattcgggcctgaaaacaaatatgaccttttttacttgaagccaatgaattttaatctatagattctttaatattagcacagaataatatctttgggtcttactatttttacccataaaagtgaccaggtagaccctttttaattacattcactacttctaccacttgtgtatctctagccaatgtgcttgcaagtgtacagatctgtgtagaggaatgtgtgtatatttacctcttcgtttgctcaaacatgagtgggtatttttttgtttgttttaaaaaaaaaaaaaaa

SEQ ID NO: 145 - DNA, 4434 bp, Homo sapiens
  misc_feature: Incyte ID No: 1383415.3
  unsure 2203: a, t, c, g, or other
ggtggatgcgtttgggttgtagctacggctttttcttttctttctcttttaaaacacatctagacaaggaaaaaacaagcctcggatctgatttttcactcctcgttcttgtgcttggttcttactgtgtttgtgtattttaaaggcgagaagacgaggggaacaaaaccagctggatccatccatcaccgtgggtggttttaatttttcgttttttctcgttatttttttttaaacaaccactcttcacaatgaacaaactgtatatcggaaacctcagcgagaacgccgccccctcggacctagaaagtatcttcaaggacgccaagatcccggtgtcgggacccttcctggtgaagactggctacgcgttcgtggactgcccggacgagagctgggccctcaaggccatcgaggcgctttcaggtaaaatagaactgcacgggaaacccatagaagttgagcactcggtcccaaaaaggcaaaggattcggaaacttcagatacgaaatatcccgcctcatttacagtgggaggtgctggatagtttactagtccagtatggagtggtggagagctgtgagcaagtgaacactgactcggaaactgcagttgtaaatgtaacctattccagtaaggaccaagctagacaagcactagacaaactgaatggatttcagttagagaatttcaccttgaaagtagcctatatccctgatgaaatggccgcccagcaaaaccccttgcagcagccccgaggtcgccgggggcttgggcagaggggctcctcaaggcaggggtctccaggatccgtatccaagcagaaaccatgtgatttgcctctgcgcctgctggttcccacccaatttgttggagccatcataggaaaagaaggtgccaccattcggaacatcaccaaacagacccagtctaaaatcgatgtccaccgtaaagaaaatgcgggggctgctgagaagtcgattactatcctctctactcctgaaggcacctctgcggcttgtaagtctattctggagattatgcataaggaagctcaagatataaaattcacagaagagatccccttgaagattttagctcataataactttgttggacgtcttattggtaaagaaggaagaaatcttaaaaaaattgagcaagacacagacactaaaatcacgatatctccattgcaggaattgacgctgtataatccagaacgcactattacagttaaaggcaatgttgagacatgtgccaaagctgaggaggagatcatgaagaaaatcagggagtcttatgaaaatgatattgcttctatgaatcttcaagcacatttaattcctggattaaatctgaacgccttgggtctgttcccacccacttcagggatgccacctcccacctcagggcccccttcagccatgactcctccctacccgcagtttgagcaatcagaaacggagactgttcatctgtttatcccagctctatcagtcggtgccatcatcggcaagcagggccagcacatcgagcagctttctcgctttgctggagcttcaattaagattgctccagcggaagcaccagatgctaaagtgaggatggtgattatcactggaccaccagaggctcagttcaaggctcagggaagaatttatggaaaaattaaagaagaaaactttgttagtcctaaagaagaggtgaaacttgaagctcatatcagagtgccatcctttgctgctggcagagttattggaaaaggaggcaaaacggtgaatgaacttcagaatttgtcaagtgcagaagttgttgtccctcgtgaccagacacctgatgagaatgaccaagtggttgtcaaaataactggtcacttctatgcttgccaggttgcccagagaaaaattcaggaaattctgactcaggtaaagcagcaccaacaacagaaggctctgcaaagtggaccacctcagtcaagacggaagtaaaggctcaggaaacagcccaccacagaggcagatgccaaaccaaagacagattgcttaaccaacagatgggcgctgaccccctatccagaatcacatgcacaagtttttacctagccagttgtttctgaggaccaggcaacttttgaactcctgtctctgtgagaatgtatactttatgctctctgaaatgtatgacacccagctttaaaacnaacaatcaggacgaaactaggaaaagggtgggggagggagggaaagagaagagctctgcacttccctttgttgtagtctcacagtataacagatattctaattcttcttaatattcccccataatgccagaaattggcttaatgatgctttcactaaattcatcaaatagattgctcctaaatccaattgttaaaattggatcagaataattatcacaggaacttaaatgttaagccattagcatagaaaaactgttctcagttttatttttacctaacactaacatgagtaacctaagggaagtgctgaatggtgttggcaggggtattaaacgtgcatttttactcaactacctcaggtattcagtaatacaatgaaaagcaaaattgttccttttttttgaaaattttatatactttataatgatagaagtccaaccgttttttaaaaaataaatttaaaatttaacagcaatcagctaacaggcaaattaagatttttacttctggctggtgacagtaaagctggaaaattaatttcagggttttttgaggcttttgacacagttattagttaaatcaaatgttcaaaaatacggagcagtgcctagtatctggagagcagcactaccatttattctttcatttatagttgggaaagtttttgacggtactaacaaagtggtcgcaggagattttggaacggctggtttaaatggcttcaggagacttcagttttttgtttagctacatgattgaatgcataataaatgctttgtgcttctgactatcaatacctaaagaaagtgcatcagtgaagagatgcaagactttcaactgactggcaaaaagcaagctttagcttgtcttataggatgcttagtttgccactacacttcagaccaatgggacagtcatagatggtgtgacagtgtttaaacgcaacaaaaggctacatttccatggggccagcactgtcatgagcctcactaagctattttgaagatttttaagcactgataaattaaaaaaaaaaaattagactccaccttaagtagtaaagtataacaggatttctgtatactgtgcaatcagttctttgaaaaaaaagtcaaaagatagagaatacaagaaaagtttttgggatataatttgaatgactgtgaaaacatatgacctttgataacgaactcatttgctcactccttgacagcaaagcccagtacgtacaattgtgttgggtgtgggtggtctccaaggccacgctgctctctgaattgattttttgagttttgtttgtaagatgatcacagtcatgttacactgatctaaaggacatatatataaccctttaaaaaaaaaatcactgcctcattcttatttcaagatgaatttctatacagactagatgtttttctgaagatcaattagacattttgaaaatgatttaaagtgttttccttaatgttctctgaaaacaagtttcttttgtagttttaaccaaaaaagtgccctttttgtcactggattctcctagcattcatgatttttttttcatacaatgaattaaaattgctaaaatcatggactggctttctggttggatttcaggtaagatgtgtttaaggccagagcttttctcagtatttgatttttttccccaatatttgattttttaaaaatatacacataggtgctgcatttatatctgctggtttaaattctgtcatatttcacttctagccttttagtatggcaaatcatattttacttttacttaagcatttgtaatttggagtatctggtactagctaagaaataattctataattgagttttgtactcaccatatatggatcattcctcatgtataatgtgccccaaatgcagcttcattttccagataccttgacgcagaataaattttttcatcatttaggtgcagcttgttgtgtagtatgttttatttttggttttcaattgaatgggaatgttctgaattttttttcaaactctacgcagatttctgttataccatgtccagccatggtacttaatgtgaaccttgataatactcttgcatatgaactaagaactagagcgttcagagtttttcctaacaaacactttgtttactttcttgtgttactggagtattctggaagggttacagaagtcctcctagaagatattatcacctcaaagtataaaaataagaccagtgggctatg

SEQ ID NO: 146 - DNA, 2009 bp, Homo sapiens
  misc_feature: Incyte ID No: 236309.1
ggtgagacatggccagacatgactcctgcttccccttaggaagtaaatcttacttatggttgtgaactgcttggagtccaggatgcccagatgtgaggggcagatgaagggaatgttgctggaaaggtgccttttaaggctgctgagaatttctggactgtgtcctgatggacgcagcaccatcaaagcccagaatttctgaaaacggtgacaaggttaacataaggacaacaaatactccaccctgtcatggtatgtgaggtgtgggtgtggcggtttctgtgtacgtttgctcatacacgcacatccaaaagcctgtgcctcattcctggccatgggtgaggacttggtctgtcacggctgatgaggactcccacaaccggccaagttatgtcttattatacacccccagaaagagagaaagctgccttctggaggactgattccacatgctatattcagctgagttgatttctgtgtctatttcaacccataacctgaagaatgatcaccttattccttattcattaattttcttgattaatagggaaacttgggaatagctataaagtaaaacttgggtggaacctggggccctggcatcacacaagtgtgattaggatggtcaaggtcatcaggagtacagcctattatattcccacatcctgagaaaggtcatttctcccacacacgacaaagtcacagacatcctgcacctgccactaggcatcctcatcctactgacatgcccatttctccagttttcttaatctgagactcccttcccttgttttttaaagataccgtgcttctccacatcctcatccttcaaggagcatattttgctcttaggatggtctttgggattcaagaatagaataataaatccaaacttggtcattcccattttgaagagatgcaagagggcccagtgaggacatccgcctccctgaaagtggtgctagacagagctgaggtcattgtatctgtgtatccacataggatttctcttaattcagcttgaattgatggggagggaggtaagagtagggtcagagttactcatcccttttcaaagaattgtgggtggaagtttgtaaaggccattcatttgattttcaaaatcaaagcgacagctctacttccacttggccttagatctctgctataccctgccatagccttgatgccactgggcacaagccacctgccaaatacaggagtggcctctcccagcctggcatgataggggggtctgtgccctcagatgtgttgacagctgctcttctgaattgccacacctgtgctacacttggaattctgtgctctgactctgcagggtaggaccacgtgccatctcacacagaggtcaaccgatgagcccactcactcgtacatgccttcttccacagtgggaagcatgatctggcaggggccgccctgtaggctggggatgggctgctgtgtgaatgttgacgttcgtttcatggagaaaggggaggtgaaagattgaagagcaggttcctgtcaatgttctgagttcgagctggaggtgtagattgaatagtctacatggtctgtgagtgtgtgagatgaacccttccatcctttgacacctggttgtatgtgtaggctaagaaggaaggaccctcctgtcagtgtgcaaagctgtaatctcatggactagaggagagggggccaaggggatggacaggagaagtcatgcagaatctaagcaggaatgcagatagaacacatctaggctcttttccccaggagagtgatgatggagcatatagatctggctcaaattcagcctccatcacttaccagtcaggaaccctggcgatatcactttaactttctgaacctcagagtcttcacctataagacggggaaaataataccaccctttcaagattgttgagataaataagtgatataaaacatgtaaagcttagttctggccacagtgtagctactcaataaatgataatactacaaaaaag

SEQ ID NO: 147 - DNA, 2382 bp, Homo sapiens
  misc_feature: Incyte ID No: 344868.13
ggacaaagccgggaagaggaaaagctcggacctaccctgtggtcccgggtttctgcagagtctacttcagaagcggaggcactgggagtccggtttgggattgccaggctgtggttgtgagtctgagcttgtgagcggctgtggcgccccaactcttcgccagcatatcatcccggcaggcgataaactacattcagttgagtctgcaagactgggaggaactggggtgataagaaatctattcactgtcaaggtttattgaagtcaaaatgtccaaaaaaatcagtggcggttctgtggtagagatgcaaggagatgaaatgacacgaatcatttgggaattgattaaagagaaactcatttttccctacgtggaattggatctacatagctatgatttaggcatagagaatcgtgatgccaccaacgaccaagtcaccaaggatgctgcagaagctataaagaagcataatgttggcgtcaaatgtgccactatcactcctgatgagaagagggttgaggagttcaagttgaaacaaatgtggaaatcaccaaatggcaccatacgaaatattctgggtggcacggtcttcagagaagccattatctgcaaaaatatcccccggcttgtgagtggatgggtaaaacctatcatcataggtcgtcatgcttatggggatcaatacagagcaactgattttgttgttcctgggcctggaaaagtagagataacctacacaccaagtgacggaacccaaaaggtgacatacctggtacataactttgaagaaggtggtggtgttgccatggggatgtataatcaagataagtcaattgaagattttgcacacagttccttccaaatggctctgtctaagggttggcctttgtatctgagcaccaaaaacactattctgaagaaatatgatgggcgttttaaagacatctttcaggagatatatgacaagcagtacaagtcccagtttgaagctcaaaagatctggtatgagcataggctcatcgacgacatggtggcccaagctatgaaatcagagggaggcttcatctgggcctgtaaaaactatgatggtgacgtgcagtcggactctgtggcccaagggtatggctctctcggcatgatgaccagcgtgctggtttgtccagatggcaagacagtagaagcagaggctgcccacgggactgtaacccgtcactaccgcatgtaccagaaaggacaggagacgtccaccaatcccattgcttccatttttgcctggaccagagggttagcccacagagcaaagcttgataacaataaagagcttgccttctttgcaaatgctttggaagaagtctctattgagacaattgaggctggcttcatgaccaaggacttggctgcttgcattaaaggtttacccaatgtgcaacgttctgactacttgaatacatttgagttcatggataaacttggagaaaacttgaagatcaaactagctcaggccaaactttaagttcatacctgagctaagaaggataattgtcttttggtaactaggtctacaggtttacatttttctgtgttacactcaaggataaaggcaaaatcaattttgtaatttgtttagaagccagagtttatcttttctataagtttacagcctttttcttatatatacagttattgccacctttgtgaacatggcaagggacttttttacaatttttattttattttctagtaccagcctaggaattcggttagtactcatttgtattcactgtcactttttctcatgttctaattataaatgaccaaaatcaagattgctcaaaagggtaaatgatagccacagtattgctccctaaaatatgcataaagtagaaattcactgccttcccctcctgtccatgaccttgggcacagggaagttctggtgtcatagatatcccgttttgtgaggtagagctgtgcattaaacttgcacatgactggaacgaagtatgagtgcaactcaaatgtgttgaagatactgcagtcatttttgtaaagaccttgctgaatgtttccaatagactaaatactgtttaggccgcaggagagtttggaatccggaataaatactacctggaggtttgtcctctccatttttctctttctcctcctggcctggcctgaatattatactactctaaatagcatatttcatccaagtgcaataatgtaagctgaatcttttttggacttctgctggcctgttttatttcttttatataaatgtgatttctcagaaattgatattaaacactatcttatcttctcctgaactgttgattttaattaaaattaagtgctaattaccattaaaaaaaaaaaaaagg

SEQ ID NO: 148 - DNA, 821 bp, Homo sapiens
  misc_feature: Incyte ID No: 368869.1
ctttatcacccacttatccagccagtcgactcacatttattgagcacctactagagtatatcctgctcatcagtagaagataggtgtcagtgagatagagaaagtcgatacccccagaggaccccacattctagacctcctctagggtcctcatattcttcactgcaagaagcattcattggtattgaagtctgtgctggaacagcttgtatttggagttacattccttcagtatgtgctgattctccaaggcagaggttttcaaatttctagaaaagtagtggagtcatttttccaaccccaaagctctgatgtgtaaaataggtaaattgaattttcattcagagatgggagctcagaccccacccatggagtcttatccacaaaacatctttgcagatggaaccccagggaggccgaagggtacggggattactctgaaatcaggctctgaaatcaggctgcctgtgtttgaattcacctttactatgtcaaccactgtgtggcattgggcaaagtgcttaacctctctgagcttgaatttactcatctgctacctggaggtaatgctagcatgtactataaatggtggttgttgggacaaaccatacatactaagcatttagtgtcatgcatggcatatagtcaagcctcaggaaatctgaggtgatttgaaacagcactgtgggctacaaatttgtgtaacaagtagttctggctcgtacgaggctccaatacaaaactaaaacacaggcatatttaaagaagagctaagatgaccagacacagtggctcacacctggaatcccccagcactttgg

SEQ ID NO: 149 - DNA, 2396 bp, Homo sapiens
  misc_feature: Incyte ID No: 3256566CB1
gcgcggcggggcgcgcgggggtgagataagcggccatgtgatcccacctgggctggaaggggaggggcgccaggtgaggcggcggccggtggggcgcgggcggccacgcggggctcctgcagcatggctgtcagcaggaaggactggtccgcgctgtccagccttgcccggcagaggactctggaggatgaggaggaacaggagcgcgagcgcaggcggcggcaccgcaacctgagctccaccacggacgatgaggctcccaggctcagccagaatggagaccggcaggcctctgcttctgagagactaccgagcgtggaagaagcagaggtgcccaagccactgcccccagcctccaaagatgaggacgaggacatccagagcatcctcagaacacggcaggagcggaggcagaggcggcaggtggtggaggctgcacaggcccccatccaggagaggctggaggcagaggaggggaggaacagcttgagccctgtgcaggccacacagaaacccctagtctccaagaaggaactggaaatcccacctcgccggagactgagtcgggaacagcggggcccctggcccctggaggaggagagcttggtgggcagggagccagaagagaggaagaaaggggttccagaaaagtccccagtcttggagaaatcctccatgccaaagaagacggcacctgaaaagagcctggtctccgataaaacctccatctctgagaaggtgctggcctcagagaagacatctctatcagagaagatagcagtgtcagagaaaagaaacagctcagagaagaagtctgttctagaaaaaaccagtgtctctgagaagtcgctggccccagggatggcactgggctcaggaaggaggctggtgtctgagaaagcttccatctttgagaaggcactggcctcagagaagagcccaactgcagatgctaagccggccccaaagagggccacagcctcagagcagcccctggcgcaggagccgccagcctctgggggaagcccagccaccaccaaggagcagagaggaagggccctccctgggaagaacctgccctctttggcaaagcagggggcttcagaccctccgactgtggcctcccgcctcccacccgtcacactccaggtgaaaatccccagcaaggaggaagaggcagatatgtcctcacccacacagcgaacctacagcagctccctcaaacgctccagccccaggaccatctcctttcggatgaaacccaagaaagaaaactcggaaacaaccctaactcgcagtgccagcatgaagctcccagacaacacagtgaagttgggagagaagctggagagataccacacggccatacggagatcagaatctgtcaagtctcggggtctgccttgcactgagttattcgtggctcctgtgggtgtagccagcaagcgccacctctttgagaaggaactggcgggccagagccgagcagaaccagcctccagccggaaggagaacttgaggctctcaggggttgtgacatcaaggctcaacctgtggatcagcaggacccaggaatctggagatcaggacccccaggaggcacagaaagcatcatctgcaaccgagaggactcagtggggacagaaatctgactcctcgctggacgctgaggtgtgacaagccccgccaagacagacctgcaagtcttcgtctcaagggacctccctcatgccaggcccctgcctctcacagcagcaccctttcctctcattgtccctgttccctttttgcctgtggatctgtttggccagggtccctggggtcaggaatatttgcaagactcagccagctccttcccagcccagcctcttggggctgggactttctcaccctgcggcaggcacaacagatgctgggacccagtctctgcccaggtcacagcacaagtgcacatcagcactatggggcctatgtcctgcccagagacctctgctccttcctgctcacatccacagtcagggcacggcgcccctcaagaactccagagtcacctgtctcatcggctcccagcaagtgcctctttgtctatgatgtcccccttctctgaggcctggacccacccatctttgtccctggggcctgctcccagccactgaggcccgctctggccaggggagaaggagctgccgtgcgtcttccctgtgccccgtctccctgcttggttctcccctcccttccctggccggctgccatggccaggagctaagtgcctttttgtgtgcaaccacttaccctttctctgaaaaacctgttctcaggaaggatctgataaactcatttactctcaggtgtaagagactgatgagaccttagaagcgaattgctctctggaggcc

SEQ ID NO: 150 - DNA, 1596 bp, Homo sapiens
  misc_feature: Incyte ID No: 4104673CB1
gcagaaggaactcatcatcatggcacacacaaaaaagagctgtgccactagaggtttctatattcttatgtaaagtcacaatttgttctacaaatctctttgagtaatttatgtctcatatatagagatctggaatagcaaaaatacttcagaggaaattaatgagtgtatcatgaccacataataatttacttatgaattttcttaggtaagaaacggttgaactggatgcaatttttatcacagcttgtgtaagactgcctctgtccctcctctcacatgccattggttaaccagcagacagtgtgctcaggggcgttgccagctcattgctcttatagcctgtgagggaggaagaaacatttgctaaccaggccagtgacagaaatggattcgaaataccagtgtgtgaagctgaatgatggtcacttcatgcctgtcctgggatttggcacctatgcgcctgcagaggttcctaaaagtaaagctctagaggccgtcaaattggcaatagaagccgggttccaccatattgattctgcacatgtttacaataatgaggagcaggttggactggccatccgaagcaagattgcagatggcagtgtgaagagagaagacatattctacacttcaaagctttggagcaattcccatcgaccagagttggtccgaccagccttggaaaggtcactgaaaaatcttcaattggattatgttgacctctatcttattcattttccagtgtctgtaaagccaggtgaggaagtgatcccaaaagatgaaaatggaaaaatactatttgacacagtggatctctgtgccacatgggaggccatggagaagtgtaaagatgcaggattggccaagtccatcggggtgtccaacttcaaccacaggctgctggagatgatcctcaacaagccagggctcaagtacaagcctgtctgcaaccaggtggaatgtcatccttacttcaaccagagaaaactgctggatttctgcaagtcaaaagacattgttctggttgcctatagtgctctgggatcccatcgagaagaaccatgggtggacccgaactccccggtgctcttggaggacccagtcctttgtgccttggcaaaaaagcacaagcgaaccccagccctgattgccctgcgctaccagctgcagcgtggggttgtggtcctggccaagagctacaatgagcagcgcatcagacagaacgtgcaggtgtttgaattccagttgacttcagaggagatgaaagccatagatggcctaaacagaaatgtgcgatatttgacccttgatatttttgctggcccccctaattatccattttctgatgaatattaacatggagggcattgcatgaggtctgccagaaggccctgcgtgtggatggtgacacagaggatggctctatgctggtgactggacacatcgcctctggttaaatctctcctgcttggcgacttcagtaagctacagctaagcccatcggccggaaaagaaagacaataattttgtttttcattttgaaaaaattaaatgctctctcctaaagattcttcacctaaaaaaaaaaaaaaa

SEQ ID NO: 151 - DNA, 874 bp, Homo sapiens
  misc_feature: Incyte ID No: 345511.2
aaaagaacctggatctcaatttaatttttcatattcttgcaatgaaatggacttgaggaagctaagatcatagctagaaatacagataattccacagcacatctctagcaaatttagcctattcctattctctagcctattccttaccacctgtaatcttgaccatataccttggagttgaatattgttttcatactgctgtggtttgaatgttccctccaacactcatgttgagacttaatccctaatgtggcaatactgaaaggtggggccttgagatgtgattggatcgtaaggctgtggccttgcattcatgggttaatggattaatgggttatcacaggaatgggactggtggctttataagaagaggaaaagagaactgagctagcatgcccagcccacagagagcctccactagagtgatgctaagtggaaatgtgaggtgcagctgccacagagggcccccaccagggaaatgtctagtgtctagtggatccaggccacaggagagagtgccttgtggagcgctgggagcaggacctgaccaccaccaggaccccagaactgtggagtcagtggcagcatgcagcgcccccttgggaaagctttaggcaccagcctgcaacccattcgagcagccacgtaggctgcacccagcaaagccacaggcacggggctacctgaggccttgggggcccaatccctgctccagtgtgtccgtgaggcagcacacgaagtcaaaagagattattctcttcccacagataccttttctctcccatgaccctttaacagcatctgcttcattcccctcaccttcccaggctgatctgaggtaaactttgaagtaaaataaaagctgtgtttgagc

SEQ ID NO: 152 - DNA, 3445 bp, Homo sapiens
  misc_feature: Incyte ID No: 1723834CB1
ggttgttgctgtagtggcggagaggatcgtggtactgctatggcggaatcatcggaatccttcaccatggcatccagcccggcccagcgtcggcgaggcaatgatcctctcacctccagccctggccgaagctcccggcgtactgatgccctcacctccagccctggccgtgaccttccaccatttgaggatgagtccgaggggctcctaggcacagaggggcccctggaggaagaagaggatggagaggagctcattggagatggcatggaaagggactaccgcgccatcccagagctggacgcctatgaggccgagggactggctctggatgatgaggacgtagaggagctgacggccagtcagagggaggcagcagagcgggccatgcggcagcgtgaccgggaggctggccgaggcctgggccgcatgcgccgtgggctcctgtatgacagcgatgaggaggacgaggagcgccctgcccgcaagcgccgccaggtggagcgggccacggaggacggcgaggaggacgaggagatgattgagagcatcgagaacctggaggatctcaaaggccactctgtgcgcgagtgggtgagcatggcgggcccccggctggagatccaccaccgcttcaagaacttcctgcgcactcacgtcgacagccacggccacaacgtcttcaaggagcgtatcagcgacatgtgcaaagagaaccgtgagagcctggtggtgaactatgaggacttggcagccagggagcacgtgctggcctacttcctgcctgaggcaccggcggagctgctgcagatctttgatgaggctgccctggaggtggtactggccatgtaccccaagtacgaccgcatcaccaaccacatccatgtccgcatctcccacctgcctctggtggaggagctgcgctcgctgaggcgagctgagggcaggcagctgcatctgaaccagctgatccgcaccagtggggtggtgaccagctgcactggcgtcctgccccagctcagcatggtcaagtacaactgcaacaagtgcaatttcgtcctgggtcctttctgccagtcccagaaccaggaggtgaaaccaggctcctgtcctgagtgccagtcggccggcccctttgaggtcaacatggaggagaccatctatcagaactaccagcgtatccgaatccaggagagtccaggcaaagtggcggctggccggctgccccgctccaaggacgccattctcctcgcagatctggtggacagctgcaagccaggagacgagatagagctgactggcatctatcacaacaactatgatggctccctcaacactgccaatggcttccctgtctttgccactgtcatcctagccaaccacgtggccaagaaggacaacaaggttgctgtaggggaactgaccgatgaagatgtgaagatgatcactagcctctccaaggatcagcagatcggagagaagatctttgccagcattgctccttccatctatggtcatgaagacatcaagagaggcctggctctggccctgttcggaggggagcccaaaaacccaggtggcaagcacaaggtacgtggtgatatcaacgtgctcttgtgcggagaccctggcacagcgaagtcgcagtttctcaagtatattgagaaagtgtccagccgagccatcttcaccactggccagggggcgtcggctgtgggcctcacggcgtatgtccagcggcaccctgtcagcagggagtggaccttggaggctggggccctggttctggctgaccgaggagtgtgtctcattgatgaatttgacaagatgaatgaccaggacagaaccagcatccatgaggccatggagcaacagagcatctccatctcgaaggctggcatcgtcacctccctgcaggctcgctgcacggtcattgctgccgccaaccccataggagggcgctacgacccctcgctgactttctctgagaacgtggacctcacagagcccatcatctcacgctttgacatcctgtgtgtggtgagggacaccgtggacccagtccaggacgagatgctggcccgcttcgtggtgggcagccacgtcagacaccaccccagcaacaaggaggaggaggggctggccaatggcagcgctgctgagcccgccatgcccaacacgtatggcgtggagcccctgccccaggaggtcctgaagaagtacatcatctacgccaaggagagggtccacccgaagctcaaccagatggaccaggacaaggtggccaagatgtacagtgacctgaggaaagaatctatggcgacaggcagcatccccattacggtgcggcacatcgagtccatgatccgcatggcggaggcccacgcgcgcatccatctgcgggactatgtgatcgaagacgacgtcaacatggccatccgcgtgatgctggagagcttcatagacacacagaagttcagcgtcatgcgcagcatgcgcaagacttttgcccgctacctttcattccggcgtgacaacaatgagctgttgctcttcatactgaagcagttagtggcagagcaggtgacatatcagcgcaaccgctttggggcccagcaggacactattgaggtccctgagaaggacttggtggataaggctcgtcagatcaacatccacaacctctctgcattttatgacagtgagctcttcaggatgaacaagttcagccacgacctgaaaaggaaaatgatcctgcagcagttctgaggccctatgccatccataaggattccttgggattctggtttggggtggtcagtgccctctgtgctttatggacacaaaaccagagcacttgatgaactcggggtactagggtcagggcttatagcaggatgtctggctgcacctggcatgactgtttgtttctccaagcctgctttgtgcttctcacctttgggtgggatgccttgccagtgtgtcttacttggttgctgaacatcttgccacctccgagtgctttgtctccactcagtaccttggatcagagctgctgagttcaggatgcctgcgtgtggtttaggtgttagccttcttacatggatgtcaggagagctgctgccctcttggcgtgagttgcgtattcaggctgcttttgctgcctttggccagagagctggttgaagatgtttgtaatcgttttcagtctcctgcaggtttctgtgcccctgtggtggaagagggcacgacagtgccagcgcagcgttctgggctcctcagtcgcaggggtgggatgtgagtcatgcggattatccactcgccacagttatcagctgccattgctccctgtctgtttccccactctcttatttgtgcattcggtttggtttctgtagttttaatttttaataaagttgaataaaatataaaaaaaaaaaaaaag

SEQ ID NO: 153 - DNA, 4281 bp, Homo sapiens
  misc_feature: Incyte ID No: 078756CB1
ctccgcgggggactggggaagcccgaaggagctctggccttttccggagctatctgtcctggagctccgagttgagcattccgggtcaaagtggccagcgaggcgggggcgcggtgggccgctggcgagctccggggcggaacgggctgccctttggcgctcgtggggttctcgctgccccctcagctcctgcgtcctggctgccctcgtaaggggtcttgtcccttggctgttctagcgactgcgaagatagctcgctgagctgggaaccccacagatcaccaacaaaaatgaaggcggcagatgagcctgcctacctgacagtgggaaccgatgtcagtgccaagtaccgaggtgccttctgtgaggcaaagattaagactgtgaaaaggctggtgaaagttaaggtactcctgaaacaggataataccacacaattggtacaagatgaccaagtaaagggtcctttaagagttggagctattgttgaaacaaggacatctgatggatcttttcaggaagctattatcagcaagttgacagatgctagttggtataccgtggtgtttgatgatggtgatgagcgaacattgagacgtacctcactttgtctgaaaggagagagacattttgcagagagtgagacacttgaccagcttccattaacaaatccagagcattttggaactccagtaattgcaaagaagacgaacagaggaaggagatcttctcttcctgttactgaagatgaaaaggaagaagaaagcagtgaagaggaagatgaagacaagcgccgtctcaatgatgaattactaggaaaagttgtaagtgtggtgtctgcaacggagaggactgaatggtatcctgctttggtaatatctcccagctgtaatgatgacatcacagtgaaaaaggatcagtgtttagttcgatcatttattgattctaaattttactctatagcaagaaaggacattaaggaagtagacattctcaatctaccggaatctgagctctccactaaaccagggcttcagaaagcaagcatcttcttaaaaactagagttgttcctgataattggaaaatggatataagtgaaatccttgagtcatccagtagtgatgatgaagatggcccagctgaagaaaatgatgaagagaaggaaaaggaggccaaaaagacagaagaagaggtgcctgaggaagaacttgatcctgaagagagggacaacttcctccagcagctttataagtttatggaagacagaggtactccaatcaacaaaccacctgttttgggctataaagatctcaatctcttcaaactcttcagactggtttatcatcagggtggatgtgacaatattgatagtggtgctgtatggaagcaaatttatatggaccttggcattcctattttgaattcagctgcttcctacaatgtaaaaactgcttatagaaagtatctctatggttttgaggagtactgccgttcggcaaatattcagttcagaactgttcatcaccatgaaccaaaagtaaaagaggaaaaaaaagacttagaagaatcaatggaagaggctctcaaattagatcaagaaatgcctttaacagaagtgaagagtgaacctgaggaaaatatcgattcaaacagtgaaagtgaaagagaagagatagaattaaaatctccgaggggacgaaggagaattgctcgagatgtaaattctattaaaaaggaaattgaagaagagaaaacagaagacaaattaaaagataatgatacagaaaataaggatgtagatgatgactatgaaactgcagagaaaaaagaaaatgagctactactggggagaaaaaatacaccaaagcaaaaagagaagaaaattaaaaaacaggaggattctgacaaagactcagatgaagaggaagagaaaagccaagagagggaagaaactgaaagcaaatgtgactctgaaggagaggaagatgaggaagacatggaaccctgcctaacaggaaccaaagtgaaagtaaaatatggacgagggaagacgcagaaaatttatgaagccagtattaaaagcactgaaattgatgacggagaagttttatatttggtacattactatggatggaatgtcagttatgatgagtgggtgaaggctgacaggataatctggcctttggacaaaggtggaccaaagaaaaaacagaagaaaaaagctaaaaataaagaagatagtgaaaaggacgaaaagagagatgaggagaggcagaagtcaaaacggggacgacctcctttaaaatcaaccctctcatcaaacatgccgtatggcttatctaagacagcaaacagtgaaggaaaatcagactcttgttcatctgatagtgaaacagaagatgctttagaaaagaatttaataaatgaagaactttctcttaaagatgaactagaaaaaaatgaaaatttgaatgatgataagctagatgaagaaaatccaaagatttctgcacatatattaaaagaaaatgataggactcaaatgcagcctttagaaaccctgaagttagaagttggagagaatgaacaaatagtacagatttttgggaacaaaatggaaaaagcagaagaagttaagaaagaagccgaaaaatctccaaaaggaaagggaagacgaagcaagacaaaagatctttctttagaaattataaagatttcatcatttggccagaatgaagcaggaagtgaacctcatatagaagctcatagtcttgaattgtcttcattagacaataaaaacttttcttctgctacagaagatgaaattgaccaatgtgtgaaagaaaagaagttgaaacggaaaatactaggacaatcatcgccagagaaaaaaataagaattgagaatggaatggaaatgacaaatactgtatctcaagaaaggaccagtgattgtattggatctgagggaatgaaaaacttaaattttgaacagcactttgaaagagaaaatgaaggaatgccatcattgatagcagagtcaaaccaatgcatccaacaactgactagtgaaagatttgatagtccagctgaagaaactgtaaatattccactaaaagaagatgaggatgcaatgcctctgatcgggcctgaaaccttggtttgccatgaagtagatttggatgatttggatgaaaaggataagaccagcattgaggatgtagcagttgaaagctctgagtctaactctcttgtttctattccacctgccctacctcctgtagtccaacataacttttcagtagcttcaccacttactcttagtcaagatgagtctcgaagcgtaaaaagtgagagtgatataacgattgaagttgatagtattgctgaagaatctcaagaaggtctctgtgagagggaatcggcaaatggatttgaaactaatgttgcctctggtacctgtagtataattgtacaagagagagagagcagagagaagggtcagaagaggccaagtgatggaaatagtggattaatggcaaaaaagcaaaagcgtaccccaaagcgaacaagtgctgcagccaaaaatgaaaagaatggaacaggacaaagcagtgatagtgaagatcttcctgtcctagacaattcaagtaaatgtaccccagtaaagcatcttaatgtatctaagccacagaaacttgcacgatctcctgcaagaatatccccgcacatcaaagatggagagaaagataaacacagagaaaaacatccgaattcatcccctaggacatataaatggagctttcagctcaatgaattagataatatgaacagtacagagagaatctcatttctccaagaaaaactacaggaaatcagaaaatattatatgtctttgaagtctgaagttgcaaccatagacaggaggagaaaaagattaaaaaagaaagacagggaagtgtctcatgcgggagcctccatgtcatctgcttcatcagacactggaatgagtccctcatcatcgtctcccccacaaaatgtacttgctgtagaatgtaggtgataaacattttctctaccttcccagcagtttgctgccatggacataaatccccaaaccctgaattacaaccacagaaagcactcaactggtttggacattgctaagtatatcctgtatacttttccaggctggattgtatctattcccctctctcttcttttttcttgttgcaaaaaataagctgattaataagtgaaggttaagcagcctgccatat

SEQ ID NO: 154 - DNA, 795 bp, Homo sapiens
  misc_feature: Incyte ID No: 331749.3
attttacatacactgtatgttatagaacttcatggatcagatctggggcagcaccctataaatcaccaccttaatatgctgcaacaaaatgtagaatattcagacaaaatggatacataaagactaagtagcccataaggggtcaaattttgctgccaaatgcgtatgccaccaacttacaaaaacacttcgttcgcagagcttttcagattgtggaatgttggataaggaattatagacctctagtagctgaaatgcaagaccccaagaggaagttcagatcttaatataaattcactttcatttttgatagctgtcccatctggtcatttggttggcactagactggtggcaggggcttctagctgactcgcacagggattctcacaatagccgatatcagaatttgtgttgaaggaacttgtctcttcatctaatatgatagcgggaaaaggagaggaaactactgcctttagaaaatataagtaaagtgattaaagtgctcacgttaccttgacacatagtttttcagtctatgggtttagttactttagatggcaagcatgtaacttatattaatagtaatttgtaaagttggttggataagctatccatgttgcaggttcatggattacttctctataaaaaatatgtatttaccaaaaaattttgtgacattccttctcccatctcttccttgacatgcattgtaaataggttcttcttgttctgagattcaatattgaatttctcctatgctattgacaataaaatattattgaactacaaaaaaaa

SEQ ID NO: 155 - DNA, 2867 bp, Homo sapiens
  misc_feature: Incyte ID No: 350528.7
gactctgccaggctcccggccatcgcccgcctggtgcgccgcccgccagctctttgcccgcgcggggccgcccgccgcgggctcagggcagaccatgcgcccgccaagtccgctgcccgcccgctggctatgcgtgctggcaggcgccctcgcctgggcccttgggccggcgggcggccaggcggccaggctgcaggaggagtgtgactatgtgcagatgatcgaggtgcagcacaagcagtgcctggaggaggcccagctggagaatgagacaataggctgcagcaagatgtgggacaacctcacctgctggccagccacccctcggggccaggtagttgtcttggcctgtcccctcatcttcaagctcttctcctccattcaaggccgcaatgtaagccgcagctgcaccgacgaaggctggacgcacctggagcctggcccgtaccccattgcctgtggtttggatgacaaggcagcgagtttggatgagcagcagaccatgttctacggttctgtgaagaccggctacaccattggctacggcctgtccctcgccacccttctggtcgccacagctatcctgagcctgttcaggaagctccactgcacgcggaactacatccacatgcacctcttcatatccttcatcctgagggctgccgctgtcttcatcaaagacttggccctcttcgacagcggggagtcggaccagtgctccgagggctcggtgggctgtaaggcagccatggtctttttccaatattgtgtcatggctaacttcttctggctgctggtggagggcctctacctgtacaccctgcttgccgtctccttcttctctgagcggaagtacttctgggggtacatactcatcggctggggggtacccagcacattcaccatggtgtggaccatcgccaggatccattttgaggattatgggtgctgggacaccatcaactcctcactgtggtggatcataaagggccccatcctcacctccatcttggtaaacttcatcctgtttatttgcatcatccgaatcctgcttcagaaactgcggcccccagatatcaggaagagtgacagcagtccatactcaaggctagccaggtccacactcctgctgatccccctgtttggagtacactacatcatgttcgccttctttccggacaattttaagcctgaagtgaagatggtctttgagctcgtcgtggggtctttccagggttttgtggtggctatcctctactgcttcctcaatggtgaggtgcaggcggagctgaggcggaagtggcggcgctggcacctgcagggcgtcctgggctggaaccccaaataccggcacccgtcgggaggcagcaacggcgccacgtgcagcacgcaggtttccatgctgacccgcgtcagcccaggtgcccgccgctcctccagcttccaagccgaagtctccctggtctgaccaccaggatcccaggggcccaaggcggcccctcccgccccttcccactcaccccggcagacgccggggacagaggcctgcccgggcgcggccagccccggccctgggctcggaggctgcccccggccccctggtctctggtccggacactcctagagaacgcagccctagagcctgcctggagcgtttctagcaagtgagagagatgggagctcctctcctggaggattgcaggtggaactcagtcattagactcctcctccaaaggccccctacgccaatcaagggcaaaaagtctacatactttcatcctgactctgccccctgctggctcttctgcccaattggaggaaagcaaccggtggatcctcaaacaacactggtgtgacctgagggcagaaaggttctgcccgggaaggtcaccagcaccaacaccacggtagtgcctgaaatttcaccattgctgtcaagttcctttgggttaagcattaccactcaggcatttgactgaagatgcagctcactaccccattctctctttacgcttagctatcagctttttaaagtgggttattctggagtttttgtttggagagcacacctatcttagtggttccccaccgaagtggactggcccctgggtcagtctggtgggaggacggtgcaacccaaggactgagggactctgaagcctctgggaaatgagaaggcagccaccagcgaatgctaggtctcagactaagcctacctgctctccaagtctcagtggcttcatctgtcaagtgggatctgtcacaccagccatacttatctctctgtgctgtggaagcaacaggaatcaagagctgccctccttgtccacccacctatgtgccaactgttgtaactaggctcagagatgtgcacccatgggctctgacagaaagcagatacctcaccctgctacacatacaggatttgaactcagatctgtctgataggaatgtgaaagcacagactcttactgctaacttttgtgtatcgtaaccagccagatcctcttggttatttgtttaccacttgtattattaatgccattatccctgaatcccccttgccaccccaccctccctggagtgtggctgaggaggcctccatctcatgtatcatctggataggagcctgctggtcacagcctcctctgtctgcccttcaccccagtggccactcagcttcctacccacacctctgccagaagatcccctcaggactgcaacaggcttgtgcaacaataaatgttggcttggattggcttggttcccctggtggttgatattctcatatggcctaaaatgggaccagcttccaacttggagccatcttcctccacccaaaggatgggtgatctaatacattactg

SEQ ID NO: 156 - DNA, 708 bp, Homo sapiens
  misc_feature: Incyte ID No: 1099159.1
  unsure 472, 474: a, t, c, g, or other
ttctcagactgccaaagaagccttgccatctggcgctcccatggctcttgcaacatctccccttcgtttttgagggggtcatgccgggggagccaccagcccctcactgggttcggaggagagtcaggaagggccacgacaaagcagaaacatcggatttggggaacgcgtgtcaatcccttgtgccgcagggctgggtgggagagactgttctgttccttgtgtaactgtgttgctgaaagactacctcgttcttgtcttgatgtgtcaccggggcaactgcctgggggcggggatgggggcagggtggaagcggctccccattttataccaaaggtgctacatctatgtgatgggtggggtggggagggaatcactggtgctatagaaattgagatgcccccccaggccagcaaatgttcctttttgttcaaagtctatttttattccttgatatttttctttttttttntnttttttgtggatggggacttgtgaatttttctaaaggtgctatttaacatgggaggagagcgtgtgcggctccagcccagcccgctgcctcattttccaccctctctccaccttgcctcgggcttctcaggcctctgctctccgacctctctcctcgaaaaccctcctccaaaggtgaagcccatcctccggggtccctccaagtctgcccggggtcctctgcccccgggttta

SEQ ID NO: 157 - DNA, 4874 bp, Homo sapiens
  misc_feature: Incyte ID No: 1530186CB1
  unsure 4822: a, t, c, g, or other
ttaacctcagccaatattaccaacattgtggaacaggtcaaaagaattgtgaataaagaagaaaacattgatataacacttggctcaactctaatgaatatattttctaatatcttaagcagttcagacagtgacttgcttgagtcatcttctgaagctttaaaaacaattgatgaattggccttcaagatagacctaaatagcacatcacatgtgaatattacaactcggaacttggctctcagcgtatcatccctgttaccagggacaaatgcaatttcaaattttagcattggtcttccaagcaataatgaatcgtatttccagatggattttgagagtggacaagtggatccactggcatctgtaattttgcctccaaacttacttgagaatttaagtccagaagattctgtattagttagaagagcacagtttactttcttcaacaaaactggacttttccaggatgtaggaccccaaagaaaaactttagtgagttatgtgatggcgtgcagtattggaaacattactatccagaatctgaaggatcctgttcaaataaaaatcaaacatacaagaactcaggaagtgcatcatcccatctgtgccttctgggatctgaacaaaaacaaaagttttggaggatggaacacgtcaggatgtgttgcacacagagattcagatgcaagtgagacagtctgcctgtgtaaccacttcacacactttggagttctgatggaccttccaagaagtgcctcacagttagatgcaagaaacactaaagtcctcactttcatcagctatattgggtgtggaatatctgctattttttcagcagcaactctcctgacatatgttgcttttgagaaattgcgaagggattatccctccaaaatcttgatgaacctgagcacagccctgctgttcctgaatctcctcttcctcctagatggctggatcacctccttcaatgtggatggactttgcattgctgttgcagtcctgttgcatttcttccttctggcaacctttacctggatggggctagaagcaattcacatgtacattgctctagttaaagtatttaacacttacattcgccgatacattctaaaattctgcatcattggctggggtttgcctgccttagtggtgtcagttgttctagcgagcagaaacaacaatgaagtctatggaaaagaaagttatgggaaagaaaaaggtgatgaattctgttggattcaagatccagtcatattttatgtgacctgtgctgggtattttggagtcatgttttttctgaacattgccatgttcattgtggtaatggtgcagatctgtgggaggaatggcaagagaagcaaccggaccctgagagaagaagtgttaaggaacctgcgcagtgtggttagcttgacctttctgttgggcatgacatggggttttgcattctttgcctggggacccttaaatatccccttcatgtacctcttctccatcttcaattcattacaaggcttatttatattcatcttccactgtgctatgaaggagaatgttcagaaacagtggcggcggcatctctgctgtggtagatttcggttagcagataactcagattggagtaagacagctaccaatatcatcaagaaaagttctgataatctaggaaaatctttgtcttcaagctccattggttccaactcaacctatcttacatccaaatctaaatccagctctaccacctatttcaaaaggaatagccacacagacagtgcttccatggacaagtccttgtcaaaactggcccatgctgatggagatcaaacatcaatcatccctgtccatcaggtcattgataaggtcaagggttattgcaatgctcattcagacaacttctataaaaatattatcatgtcagacaccttcagccacagcacaaagttttaatgtctttaagaaaaagaaatcaatctgcagaaatgtgaagatttgcaagcagtgtaaactgcaactagtgatgtaaatgtgctattacctaggtaactgcatatatataaggaatgtattttgttaagaaggcttttgtgaaattcagaatttttctttttaatatatttcttccatggaagagttgtcatcactaaaacttcagtactgagagtaacatgactcagtagccacagaagctatgatttgtaaaatatataattgaatcagagtaatcataatgcaggggagacattcaaattagagacaagggagaagcaatgctgaggaagaccctagatagagctcattttactccacctaatcgttatatctggatatacccattttctgcatcttctttctcaacaataaaaaatgtaactattttgaatgcccacaaatcccattccagtgttactttctgtgaatgcagtaccatattctcattttcaatgacatttcaaccacaggcagaaaagactgtttactccttgacccaaagattaaaaaggattttttattattttaaatattacaccttcagaaccataacatgcttaagaaaactttcccaaaatgttgacctagttaaatgaggctatataaatttctaatattttacttattctattcaaggcatagggccaaagcattaagtataatttaatcccatacattcgagttaagtttagtgttgatgttccatcattctggacctcccaggagttgtttaagaatgaatctcttacacctctacttttgcccctctactgtatattaagcccataggcttgtgggaggaaggagaatttccattaggcaagctgtatgcagtggaattttccttttaggagacacacaattaagactctctggttctgtccttgctttggagactttaagacatttcctaaagcacaaataaaagcctcgtatttccccattgagagttttgttccaaggaatatgaagtgagacatatgggtgagtcataataatcaaaataatttatgaagagctgggtctgcaatagctagtctaaaaactacttgtgtgtcagtcctctggttatagtatataagagcctgaggaggtctggcaagatagatggtgtattatttatggatcaggctgctgcatacaaaccttgcatactattatgcagcttacctaactctcagactattctgagtaatgcttgcttgctaatgaatgtataggagaccacattgtaattgttcttagatgatggagtccatgcagtttcttagaaatcggtctcagtgcatgctgtgctttttcacatttgctctgggttatctgggaagtatcaggttctgggaggcaacagcattaagtgataagaaaaggagacattctggcaaagccaatctgcttaaaggcaaagtccagaacctggaacctagaggcctttctctctgcacgaaaaacaggtagtttgcagtctgagatatgggagagcttttaggctacacagcaacccaagggacctctcaccttttgctgagcttcaatcaggaagctatttgcctggctccagcagatgatgagataatgaggtagtgggttttttattactgttccattttgcaacatcctgcaacaccatcctgggagacaagagcattacccagcttggctttcacgggggagggttgtattcagtaaaaaagaatagtaaatataaggtcactgagattctaagtaagatagtaaatctaaggtcactgagccaaatccttttcaataggcatatattaacaggctgcttattttggcggaggttacatatggatgaaaatgaatcttagtcactgaatattcatatacatttcccccaaaaccttagacattcatagtagattttaattagttagctttctaactagtcagatttctgcccaaagtgcttagtcaatagtaattaagatatagcttcaaaaatggctttgcttttgatttctactcatattcgtatggctccagaaaaatatttttttcatatttgacaatgtcagctccactttagaaattttcaataaccagatgagaaaaaaattaagaaattgctcaagggaaacatttgtaaatggatttgaaagattgagccaaattctgttgtcagttctaagcatgcagttctcacctccatttagtcccccatcagaacagaggtcaggaatttagctggggagcctaaatttagttcagcttacctttgagaatagcatcaattcagactctcttttcattatgttttcttttctttttccctctttttaaactacattgtgttagagtcatagtctaggatcctgagagattttccattcttgtcaccattcacttgcattgtaaagattttctttgtctgttgttggcatagattcttttgtacatatttatttatttgtgtttatatatgtcaattggtttcctttcttagcttgatattgcctagctttgttgttttaattaactttctattagagagactgtatatattttttctaaatactttgtgaaatcatttttggtagcaatatctttgaatatgatgaataaaagtgactgtgagtgcaaatagaattagcagtaagaagctactctagctaatttgccattttacttaaatggaaaatgtttttcaaataaatacttatgttgttcatgttccaagttattcaattcctttatgagtgaatgtttttacttttgactcctaaataggaaaagattatttgacagctggaaaataacctgccaccaattaagcgagtgacataggggctactttgtcccaaanaaacctcgaatggatgttaccgatcagttcctaaggatatgcattttgagtc

SEQ ID NO: 158 - DNA, 1636 bp, Homo sapiens
  misc_feature: Incyte ID No: 1092387.11
ttaccagatcaaaggcagttccgtcaatcttgtgggccaggttccaattcccacctctttcacatggaattgcttgctggatcctgtcaatttagcatttttaatcatttcaaacctttttcgtgcctgtctttgcatgtttgcccatgagccaaacactgcatttgcctccagaaagtctgtcttagtggagcgaataggagcacttggccttggtgttctgcaatatggagatctcagtgcagagaatgaagaaatgttaaaatcaaatgcagagtgtagatgcaaaagcaccattgttggagataatttataaccaataacagaagtttactattcctctgtgttctaaggttctaggattcatagaaggtcattcatataatgagggaaaaaagaagttatgtaactgctggcagtagggatttcaacaagtaatagagatgatgagataatgtgtgaaaaaaacaagcacaatggtacatcataagtacccaaaatttggtggatattattagtagtattttattcatttagaggaaaatacaaaatgaaaacggagatgataaaaagaaaaggaaaagtggcaagcattagaaagttttaaaaccaattaatgtttttggggatcatgaaatcaatcactagtgttattttgtagaactcaaatatggtctggagtaaaccacttgcgagcttccaagtgtttgctcttggtgtaatcaaaaaggataggctcaattccctaattaataagttgtaattgtacatgtgagcagtcatttatctgtgtctttacattttgtgttatttctgcctataaaatggtttatacattgtagctctttggatattggaccctatatcaaaaacaacaatttacttttctgaatctaaccaactatgttgcatatgataggcaggtagtaatatgtaaagtaattaagtataattgctaccagtataatcatcacactcaaaattgtttattagtgatgagcatatgtcttgcttattcctcttcaatgtaaggcagtatagttccatttttactgagaatttgaaatagaaaaggtcaggatatctctttgctctgttgacagatgtagagaaatatgtttgaacatttcactttgtgtgttttatgtgttaagttccaggcaggggaatagaattaaattattctttattttgaaaatacagatatgataaagtcacattcattaaacaaagaaacacagattctagagcagtcagaaaatgaacttcttaacatctacactagcggcagcttcctagaaatcactgcactacccgctagtaacggagtcattgccattcagagtgtgcatttttttttctctttccagttttgctggcccccctaattatccattttctgatgaatattaacatggagggcattgcatgaggtctgccagaaggccctgcgtgtggatggtgacacagaggatggctctatgctggtgactggacacatcgcctctggttaaatctctcctgcttggtgatttcagcaagctacagcaaagcccattggccagaaaggaaagacaataattttgttttttcattttgaaaaaattaaatgctctctcctaaagattcttcacct

SEQ ID NO: 159 - DNA, 3900 bp, Homo sapiens
  misc_feature: Incyte ID No: 107939.2
  unsure 3896-3897: a, t, c, g, or other
atcttcatttcatagggagaggaagacagtgttcgggtactgcctaaagtagctatactagtagttcagcatgtactaattggggaggcaattccagctcatccagttcccttcccatgcttcctcctcctcctcacaaccaagtgtggcctggctgacacatccctatggctttgtttcaggtgggtctttttcgcaaatcaggagtgaagtctcgaatccatgcccttcgccaaatgaatgaaaacttccctgagaacgtcaactatgaagaccagtctgcttatgatgtggcggatatggtgaaacagttcttccgggacctccctgagcctcttttcaccaacaagctcagtgagacctttctccatatctatcagtatgtctccaaagagcagcggctgcaggccgtgcaggctgccatcctgctactggccgatgagaacagggaggtcctgcagacgctcttgtgtttcctgaacgacgtcgtcaacttggtggaagagaatcagatgacgcccatgaacctggcagtgtgtctggccccctccctctttcatcttaatttattgaagaaagaaagctctccacgagtcatacagaagaaatatgccactgggaagccagatcaaaaggacctcaacgagaatctggcagcagctcaggggctagcgcacatgatcatggaatgcgacagactttttgaggttccacacgagttggtggcccagtctcgtaactcgtatgtggaggctgagatccacgtgccaaccctggaagaattggggacacagctggaggagagtggggcaactttccacacttacctgaaccatctcatccagggcctccagaaagaagccaaggagaagttcaaaggatgggtcacgtgctccagcacggacaatacagatcttgctttcaaaaaggtgggcgacgggaacccgctgaagctgtggaaggcttctgtggaggtggaagcacccccctcagtggtcctgaaccgcgtgctgagagagcgccacctgtgggacgaggactttgtgcagtggaaggttgtggaaactctagacaggcaaacagagatctaccagtatgtgctgaacagcatggctccccatccttccagagactttgtggttctcaggacctggaaaactgatttgcccaaaggaatgtgtaccctggtgtccctctccgtggagcatgaggaagcccagctcctgggtggtgtgcgagcagtggtgatggactcgcagtacttgatagaaccgtgtggctctggcaagtcaagactgactcacatctgcaggatagacctgaaaggtcactccccagaatggtacagcaaaggctttggacatctgtgtgcagcagaagttgccaggattagaaactctttccagcccctcattgctgagggcccagaaactaaaatctgagttttgcccagtgtgacatcaaactcagggaagaggaagctaaagtgacgagtgtggcagagagtgtgcatgtgagaaagcgagagaaagaggaactgaaggacgcggttaatgcctaaaaatggaaacgttaagaagttggaatgttggagatgcaagaatttccaagaactttcttagccttcctggagatggctacatccctactaatataattttaaaatgagaactttatatatattacttaaaattaaatggactattccttgtgcattgcctaatttgctatttaaaggcttctaagaagcgtatacctaactgtaaataaatgtatgtatagcatatgtacatatgtgtgtatatctccatctttactgtatatatgtaaaataccaattttatatagaattgtgtgttttgaaaatgacggtgtctgactcagtgagtcccttcctcacacagttctttccaagtggctctgggccccatctctccactgtcctgtaagctgtgcagaacctgctgctaacaccaaggtgtgaacatgccctgatgcctaaccaaagatgagttaaccaaaggaaaataacattaaaggagacttatgtgttaacgctttgtttctgctattcaaaaactgagagtggagatctgggataaagcaaggaaataataattactcctccttaaagcaaatgggggggtgagaagtcattaccaaatttaaagctagatgaggagttgccactgggcccagtaagatggaatttcagtgagatatggaccaccggagtcagcgagagtgactgaaacagaagcgatacctctcgctcccatgcccatcactacagaccccaagtcaagatgaatatcatagcctttacttcttcacagccaaagggagcccctgtgttgtctcaagtttttataaatacatttcataatgttattaaatgtcattctatttgaccagtggcctatttggtcacagttaattggtgttttcttattgcactgaattcaactccagacaccatacaaagggagatgatggccattccgttcaaatcctagatcgttacagcttcagggaattcatattttgttatgtgtaggatactcttaaaatgtaattcattaaacttttacaatctgaaagacagggtttttaactaacatgagaccaaaactatgttctttgattagttttagatagtataatcgggtttattaattcttctgtgtttcttcactagccagtccaagctacctatgcatttgacccaaccttatttattattgtacagatgaagcgaattgactccctttagccaactgctaatggatcgaatgtgctttttattgtaattcaacagctatagagagaaagataacttattgtgtgtttgatttcagggagagagattttctttggtcatccataatagagattgataagatttagcaactggtgttggagaaaaaaagaaaagcaaatgagtgttttcaggtttttttgcattatatgcatttatgtaatgtttctgttatcagcaatgtgcaattattttattgagaggaataaaaaagctttctatgagtttggtatggtgcgaggaaaatcttacagtttgaattatgacctagaaatttttcattcccatgtctacctaagaaggaagcagtaaatccataatttaccttttgggcaatgctttgtgagcaaaacaaagtcacttctgccataacatcttgaatttaaccatatatgccagattactttatatgcatcaacaagatcaccagtgaagtttaatctagctaaacactggtcctgctcctgagatgggatcctatgtgtttggaaaacgtgataggcacacgaggatgagtggctttgtatcgcccagagaggtgcttgtccagatttcacatgcacatgaattgcctggggatcttgtgaaactgcagactctgctccaagtaatctgggctgggcctgagattctgcatttctaaggagtctcagggatgcctatgctgctggcctaaaaccacactcagaaacgaggacctagaagatccctaaaacagaataagaacaaatgtgattgtatttctgattctccctctcttcgaattatctgacttttttgtttttgtgcacatagtaatcatatcaccgctgcataacaacacagtgcatctttttaaaacaaggaaaagggaaaaaaaggagaaaaaacgatgcatcaagcttgtttgtcaaataccacagtattttattcattgttatcttgccaatggaaataaagtatgatattgcatttaaatattatatttatacctcatgtatatttttacctcaattgttgatatcaatcatcaattgtaaataaataattgccaaggcaaataaatttatatatattaaatatttcctattttctatannata

SEQ ID NO: 160 - DNA, 4259 bp, Homo sapiens
  misc_feature: Incyte ID No: 899248.6
  unsure 2454, 3180, 3205-3252: a, t, c, g, or other
ccggaaaactgatacagtcaggttaacatctgtggtcacaccaagaccctttggctctcagacaaggggaatctcatcactccccagatcttacacgatggatgatgcttggaagtataatggagatgttgaagacattaagagaactccaaacaatgtggtcagcacccctgcaccaagcccggacgcaagccaactggcttcaagcttatctagccagaaagaggtagcagcaacagaagaagatgtgacaaggctgccctctcctacatcccccttctcatctctttcccaagaccaggctgccacttctaaagccacattgtcttccacatctggtcttgatttaatgtctgaatctggagaaggggaaatctccccacaaagagaagtctcaagatcccaggatcagttcagtgatatgagaatcagcataaaccagacgcctgggaagagtcttgactttgggtttacaataaaatgggatattcctgggatcttcgtagcatcagttgaagcaggtagcccagcagaattttctcagctacaagtagatgatgaaattattgctattaacaacaccaagttttcatataacgattcaaaagagtgggaggaagccatggctaaggctcaagaaactggacacctagtgatggatgtgaggcgctatggaaaggctggttcacctgaaacaaagtggattgatgcaacttctggaatttacaactcagaaaaatcttcaaatctatctgtaacaactgatttctccgaaagccttcagagttctaatattgaatccaaagaaatcaatggaattcatgatgaaagcaatgcttttgaatcaaaagcatctgaatccatttctttgaaaaacttaaaaaggcgatcacaattttttgaacaaggaagctctgattcggtggttcctgatcttccagttccaaccatcagtgccccgagtcgctgggtgtgggatcaagaggaggagcggaagcggcaggagaggtggcagaaggagcaggaccgcctactgcaggaaaaatatcaacgtgagcaggagaaactgagggaagagtggcaaagggccaaacaggaggcagagagagagaattccaagtacttggatgaggaactgatggtcctaagctcaaacagcatgtctctgaccacacgggagccctctcttgccacctgggaagctacctggagtgaagggtccaagtcttcagacagagaaggaacccgagcaggagaagaggagaggagacagccacaagaggaagttgttcatgaggaccaaggaaagaagccgcaggatcagcttgttattgagagagagaggaaatgggagcaacagcttcaggaagagcaagagcaaaagcggcttcaggctgaggctgaggagcagaagcgtcctgcggaggagcagaagcgccaggcagagatagagcgggaaacatcagtcagaatataccagtacaggaggcctgttgattcctatgatataccaaagacagaagaagcatcttcaggttttcttcctggtgacaggaataaatccagatctactactgaactggatgattactccacaaataaaaatggaaacaataaatatttagaccaaattgggaacacgacctcttcacagaggagatccaagaaagaacaagtaccatcaggagcagaattggagaggcaacaaatccttcaggaaatgaggaagagaacaccccttcacaatgacaacagctggatccgacagcgcagtgccagtgtcaacaaagagcctgttagtcttcctgggatcatgagaagaggcgaatctttagataacctggactccccccgatccaattcttggagacagcctccttggctcaatcagcccacaggattctatgcttcttcctctgtgcaagactttagtcgcccaccacctcagctggtgtccacatcaaaccgtgcctacatgcggaacccctcctccagcgtgcccccaccttcagctggctccgtgaagacctccaccacaggtgtggccaccacacagtcccccaccccgagaagccattccccttcagcttcacagtcaggctctcagctgcgtaacaggtcagtcagtgggaagcgcatatgctcctactgcaataacattctgggcaaaggagccgccatgatcatcgagtccctgggtctttgttatcatttgcattgttttaagtgtgttgcctgtgagtgtgacctcggaggctcttcctcaggagctgaagtcaggatcagaaaccaccaactgtactgcaacgactgctatctcagattcaaatctggacggccaaccgccatgtgatgtaagcctccatacgaaagcactgttgcagatagaagaagaggtggttgctgctcatgtagatctataaatatgtgttgtatgtcttttttgcttttttnttaaaaaaaagaataactttttttgcctctttagattacatagaagcattgtagtcttggtagaaccagtatttttgttgtttatttataaggtaattgtgtgtggggaaaagtgcagtatttacctgttgaattcagcatcttgagagcacaagggaaaaaataagaacctacgaatatttttgaggcagataatgatctagtttgactttctagttagtggtgttttgaagagggtattttattgttttttaaaaaaaggttcttaaacattatttgaaatagttaatataaatacataattgcatttgctctgtttattgtaatgtattctaaattaatgcagaaccatatggaaaatttcattaaaatctatccccaaatgtgctttctgtatccttccttctacctattattctgatttttaaaaatgcagttaatgtaccatttatttgcttgatgaagggagctctattttctttaccagaaatgttgctaagtaattcccaatagaaagctgcttattttcattaatgaaaaataaccatggtttgtatactagaagtcttcttcagaaactggtgagcctttctgttcaattgcatttgtaaataaacttgctgatgcatttaacgagtgggtcgtctttttcttaggtgtatgtgtctgacctcaggccttttagccatatttcagtatgtggccttttttgatgttatgttttanccagtagctttactaaggtataatnnnnnnnnnnnnnnnnnnnnnnnnnnnnnnnnnnnnnnnnnnnnnnnngacatggtgtataccttcgaaactatgccacagtctggatgtgtttactgaaacattttaataaggaagtttatttttgataaagttatgtttttggatacaatatatttgtatggtgagagtgatgaattgttggatcatttgaataaaatcttttactaaccccatgataaaaggagaagacaacagtgagcttagaatatctataaagcaaaaaatgtagtctcttgtttaaaaaatctggagcgggaatgcaaggatacaaaactttagcatgctttgagcaaaaatttaaacttactggaatcttttataataatgtaagtggaatggaggattctaggaactgagaactgtattggaataggttcaaaatatgtaagaaatgctaatgtgggagataaaaattttatttagtacttattctgattattattaaagtaataatgtgttccttgaggataacttgtcaaatgccccaaagcataaagaatataattctgaatcccaaattccaaagacaagaactctgtgtttgaattcattctgcatataattatttataagtatagattgtgaatttttccatgttcttaaaattatttttatcttttttcatggttgcatagtgctccattgtttggccttggtaatatttagttgataattccattactgtgtatttttcacttgtttctaagatcaaacattttaatatgtgcatgttatatataaatatgtaaattctgtgatactctatgatcatctctttctttatattattttcatagacatgaaatagttgctcagagattatgcattttgagacactcatagtatatattgccaaagtggtttccagaaaggcactgctggcttcgactcctataagcagcacgtgggcttgttcatctcactgcatgtttatgaagatacagttcttttgccttgttctctgcctgatgtgtatgcagaggcagccctcaatatgcagtggttgaataaat

SEQ ID NO: 161 - DNA, 4610 bp, Homo sapiens
  misc_feature: Incyte ID No: 2959521CB1
ggggcccggacgcatgaggggggtcggcgcgcgtgtctacgcggacgcaccggctaagctgcttctgccgccgccggccgcctgggaccttgcggtgaggctgcgcggggccgaggccgcctccgagcgccaggtttattcagtcaccatgaagctgctgctgctgcacccggccttccagagctgcctcctgctgaccctgcttggcttatggagaaccacccctgaggctcacgcttcatccctgggtgcaccagctatcagcgctgcctccttcctgcaggatctaatacatcggtatggcgagggtgacagcctcactctgcagcagctgaaggccctgctcaaccacctggatgtgggagtgggccggggtaatgtcacccagcacgtgcaaggacacaggaacctctccacgtgctttagttctggagacctcttcactgcccacaatttcagcgagcagtcgcggattgggagcagcgagctccaggagttctgccccaccatcctccagcagctggattcccgggcctgcacctcggagaaccaggaaaacgaggagaatgagcagacggaggaggggcggccaagcgctgttgaagtgtggggatacggtctcctctgtgtgaccgtcatctccctctgctccctcctgggggccagcgtggtgcccttcatgaagaagaccttttacaagaggctgctgctctacttcatagctctggcgattggaaccctctactccaacgccctcttccagctcatcccggaggcatttggtttcaaccctctggaagattattatgtctccaagtctgcagtggtgtttgggggcttttatcttttctttttcacagagaagatcttgaagattcttcttaagcagaaaaatgagcatcatcatggacacagccattatgcctctgagtcgcttccctccaagaaggaccaggaggagggggtgatggagaagctgcagaacggggacctggaccacatgattcctcagcactgcagcagtgagctggacggcaaggcgcccatggtggacgagaaggtcattgtgggctcgctctctgtgcaggacctgcaggcttcccagagtgcttgctactggctgaaaggtgtccgctactctgatatcggcactctggcctggatgatcactctgagcgacggcctccataatttcatcgatggcctggccatcggtgcttccttcactgtgtcagttttccaaggcatcagcacctcggtggccatcctctgtgaggagttcccacatgagctaggagactttgtcatcctgctcaacgctgggatgagcatccaacaagctctcttcttcaacttcctttctgcctgctgctgctacctgggtctggcctttggcatcctggccggcagccacttctctgccaactggatttttgcgctagctggaggaatgttcttgtatatttctctggctgatatgttccctgagatgaatgaggtctgtcaagaggatgaaaggaagggcagcatcttgattccatttatcatccagaacctgggcctcctgactggattcaccatcatggtggtcctcaccatgtattcaggacagatccagattgggtagggctctgccaagagcctgtgggactggaagtcgggccctgggctgcccgatcgccagcccgaggacttaccatccacaatgcaccacggaagaggccgttctatgaaaaactgacacagactgtattcctgcattcaaatgtcagccgtttgtaaaatgctgtatcctaggaataagctgccctggtaaccagtctctagctagtgcctcttgccctctcctcacctccttttctctcagtgactctggaacctgaatgcagcttacaagacaagcctgacttttttctctgattaccttggcctcctcttggaaccagtgctgaaaggttttgaatcctttacccaacaatgcaaaaatagagccaatggttataacttggctagaaatatcaagagttgaatccatagtgtggggcccatgactctagctgggcaccttggacctccagctggccaatagaagagacaggagacaggaagccttcccattttttcaaagtctgtttaattgcctattacttctctcaaagagaacctgaagtcagaacacatgagcagggtgagaggtgaggcaaggttcatcctgaatgggagaggaagtcgaaccactgctgtgtgtcttgtcaggatgctcacttgttcctactgagatgctggatattgattttgtaacagcacccggtgtttcacggctgtccgagtgagctaacgtggcggtgtggctgcctggacctcctctttcaggttaacgctgacagaatggaggctcaggctgtctgcaagaaaacagttggtttggctgtgattttgacctcctcttccccactgccatcttctaagagactttgtagctgcctcctagaagcacattctgagcacatttgagacctctgtgttagaggggagactgcacaaactatcctcccccaggttgagacgtctgcagagtggcaagctgacttgtagaaatggggtgccatttatgctctacttagacaagggtaatcagaaatggaatcagtgcaggcaaaatttaggatttgccgcttccataaatcaaagcatgactaatagggggtctctgaaatgtaagggcacaaacttcacttagggcatcgcagatgtttgcagaatggttggcctaatgattatgctacagatgggttttaaatgacccgtctaggttactgcttccttgcaaaaaaagtcgaatcctgcattgaattgaatatgaatttctctaactctctccagaaaatggatggagataacttgtctttaaaactgtaggccagccttagccactgtggagcccttgcctccgagctctggcttcaaggggagctcttctccaggttcactaggtgaattgatttattattatcatattgataatgtgagattctttagccactttggggagcctgtctctccagaagcctttcttagtggtgcccacagttggagcccaggggccatgtttgcaaactgattcatgtgcatggctgacaggagtactggttcactaccaatgcctgagcttttctcttacatagaaaaactgtccgctctcagtaatcacaagcagcatccgttttgttttctcttcttgggagacatctgtcaaaccaggaatattcttgaaaagaacgtgagcaggaaaaactgctggtgatactttttttaagttttgtttttatcttgcctgttggcttcaatacatttgagaatacgctgaagagggaaaatttcagtgatggagattctagattaaatatcaggactgatttcctggtgggaggattatggtccagttttaccaaagaaccaattccttgaatgttggaatctaactttttatattgtcattattattgttgtttttaaacggttctttgtcttttctgttttatttttctcaagctgctttcaggagctagcagaaaataactcaaagttgaagactctggaagattttgctttaacctaactcgcattgatgtattaaatttataattttagcattcccaatagatcctatcattccttaaacataataccctttgtcttggagtagaatactaagttagagttagtggatttctagtttaggagaggagctcaaaactataatctttaacaaattgaaaaatgaaatagggtgttttccctttttgtgcacacctatattaccttaagaaatttccttccatagacagctgcctcaaagggaaatcctctttaaaccgtagttggcgcagaggtcagtcctagtcggagcttaggaggggcggagacgctcacatcgtctgacttgagtcgccactgattgtggcaacagctttgcctcatgagtcaaaaattggcaatttcttttgatttttagttgttgaatttgctgtttcaagcatttgtacatattagaagtctaaggagtagcaagtcagtgggaggactttttcacccctggcattagcagcttcgacctcattttccagatgcaccagctcctattaataagttagcaaggaaagtgtatgtcacgtgcaggaacagtgaggcagggacaggggttctgctccttctcacttcaccaccggcacacagcttgcccctgtctttgcccccaaaggtattttgtgtctagtgtcaaattggagctattcttcactggtccttaaccttgggttttaaaaagaaggcttctctgtttgggtagcgtaagagctgagtatagtaagtcctcttccaaagagatggcaatatgctgggcatctactttaaaacaaagttgtctgatttttgcaagagaggttaggattttattgttcttatttccctttacagttctgcagttccatcacagtatttttttaaataactcaggtgtatgagaagaaattagaaaagaaaattaacttatgtggactgtaaatgttttatttgtaagattctataaataaagctatattctgtaaaac

SEQ ID NO: 162 - DNA, 3914 bp, Homo sapiens
  misc_feature: Incyte ID No: 3331519CB1
ccgacccacactgaccaacacaggctgagcagtcaggcccacagcatctgaccccaggcccagctcgtcctggctggcctgggtcggcctctggagtatggtctggcgggtgccccctttcttgctccccatcctcttcttggcttctcatgtgggcgcggcggtggacctgacgctgctggccaacctgcggctcacggacccccagcgcttcttcctgacttgcgtgtctggggaggccggggcggggaggggctcggacgcctggggcccgcccctgctgctggagaaggacgaccgtatcgtgcgcaccccgcccgggccacccctgcgcctggcgcgcaacggttcgcaccaggtcacgcttcgcggcttctccaagccctcggacctcgtgggcgtcttctcctgcgtgggcggtgctggggcgcggcgcacgcgcgtcatctacgtgcacaacagccctggagcccacctgcttccagacaaggtcacacacactgtgaacaaaggtgacaccgctgtactttctgcacgtgtgcacaaggagaagcagacagacgtgatctggaagagcaacggatcctacttctacaccctggactggcatgaagcccaggatgggcggttcctgctgcagctcccaaatgtgcagccaccatcgagcggcatctacagtgccacttacctggaagccagccccctgggcagcgccttctttcggctcatcgtgcggggttgtggggctgggcgctgggggccaggctgtaccaaggagtgcccaggttgcctacatggaggtgtctgccacgaccatgacggcgaatgtgtatgcccccctggcttcactggcacccgctgtgaacaggcctgcagagagggccgttttgggcagagctgccaggagcagtgcccaggcatatcaggctgccggggcctcaccttctgcctcccagacccctatggctgctcttgtggatctggctggagaggaagccagtgccaagaagcttgtgcccctggtcattttggggctgattgccgactccagtgccagtgtcagaatggtggcacttgtgaccggttcagtggttgtgtctgcccctctgggtggcatggagtgcactgtgagaagtcagaccggatcccccagatcctcaacatggcctcagaactggagttcaacttagagacgatgccccggatcaactgtgcagctgcagggaaccccttccccgtgcggggcagcatagagctacgcaagccagacggcactgtgctcctgtccaccaaggccattgtggagccagagaagaccacagctgagttcgaggtgccccgcttggttcttgcggacagtgggttctgggagtgccgtgtgtccacatctggcggccaagacagccggcgcttcaaggtcaatgtgaaagtgccccccgtgcccctggctgcacctcggctcctgaccaagcagagccgccagcttgtggtctccccgctggtctcgttctctggggatggacccatctccactgtccgcctgcactaccggccccaggacagtaccatggactggtcgaccattgtggtggaccccagtgagaacgtgacgttaatgaacctgaggccaaagacaggatacagtgttcgtgtgcagctgagccggccaggggaaggaggagagggggcctgggggcctcccaccctcatgaccacagactgtcctgagcctttgttgcagccgtggttggagggctggcatgtggaaggcactgaccggctgcgagtgagctggtccttgcccttggtgcccgggccactggtgggcgacggtttcctgctgcgcctgtgggacgggacacgggggcaggagcggcgggagaacgtctcatccccccaggcccgcactgccctcctgacgggactcacgcctggcacccactaccagctggatgtgcagctctaccactgcaccctcctgggcccggcctcgccccctgcacacgtgcttctgccccccagtgggcctccagccccccgacacctccacgcccaggccctctcagactccgagatccagctgacatggaagcacccggaggctctgcctgggccaatatccaagtacgttgtggaggtgcaggtggctgggggtgcaggagacccactgtggatagacgtggacaggcctgaggagacaagcaccatcatccgtggcctcaacgccagcacgcgctacctcttccgcatgcgggccagcattcaggggctcggggactggagcaacacagtagaagagtccaccctgggcaacgggctgcaggctgagggcccagtccaagagagccgggcagctgaagagggcctggatcagcagctgatcctggcggtggtgggctccgtgtctgccacctgcctcaccatcctggccgcccttttaaccctggtgtgcatccgcagaagctgcctgcatcggagacgcaccttcacctaccagtcaggctcgggcgaggagaccatcctgcagttcagctcagggaccttgacacttacccggcggccaaaactgcagcccgagcccctgagctacccagtgctagagtgggaggacatcacctttgaggacctcatcggggaggggaacttcggccaggtcatccgggccatgatcaagaaggacgggctgaagatgaacgcagccatcaaaatgctgaaagagtatgcctctgaaaatgaccatcgtgactttgcgggagaactggaagttctgtgcaaattggggcatcaccccaacatcatcaacctcctgggggcctgtaagaaccgaggttacttgtatatcgctattgaatatgccccctacgggaacctgctagattttctgcggaaaagccgggtcctagagactgacccagcttttgctcgagagcatgggacagcctctacccttagctcccggcagctgctgcgtttcgccagtgatgcggccaatggcatgcagtacctgagtgagaagcagttcatccacagggacctggctgcccggaatgtgctggtcggagagaacctagcctccaagattgcagacttcggcctttctcggggagaggaggtttatgtgaagaagacgatggggcgtctccctgtgcgctggatggccattgagtccctgaactacagtgtctataccaccaagagtgatgtctggtcctttggagtccttctttgggagatagtgagccttggaggtacaccctactgtggcatgacctgtgccgagctctatgaaaagctgccccagggctaccgcatggagcagcctcgaaactgtgacgatgaagtgtacgagctgatgcgtcagtgctggcgggaccgtccctatgagcgacccccctttgcccagattgcgctacagctaggccgcatgctggaagccaggaaggcctatgtgaacatgtcgctgtttgagaacttcacttacgcgggcattgatgccacagctgaggaggcctgagctgccatccagccagaacgtggctctgctggccggagcaaactctgctgtctaacctgtgaccagtctgacccttacagcctctgacttaagctgcctcaaggaatttttttaacttaagggagaaaaaaagggatctggggatggggtgggcttaggggaactgggttcccatgctttgtaggtgtctcatagctatcctgggcatccttctttctagttcagctgccccacaggtgtgtttcccatcccactgctcccccaacacaaacccccactccagctccttcgcttaagccagcactcacaccactaacatgccctgttcagctactcccactcccggcctgtcattcagaaaaaaataaatgttctaataagctccaaaaaaaaaaaaaaa

SEQ ID NO: 163 - DNA, 2341 bp, Homo sapiens
  misc_feature: Incyte ID No: 1453334CB1
gaccgcagccccggagcccgggccagggtccacctgtccccgcagcgccggctcgcgccctcctgccgcagccaccgagccgccgtctagcgccccgacctcgccaccatgagagccctgctggcgcgcctgcttctctgcgtcctggtcgtgagcgactccaaaggcagcaatgaacttcatcaagttccatcgaactgtgactgtctaaatggaggaacatgtgtgtccaacaagtacttctccaacattcactggtgcaactgcccaaagaaattcggagggcagcactgtgaaatagataagtcaaaaacctgctatgaggggaatggtcacttttaccgaggaaaggccagcactgacaccatgggccggccctgcctgccctggaactctgccactgtccttcagcaaacgtaccatgcccacagatctgatgctcttcagctgggcatggggaaacataattactgcaggaacccagacaaccggaggcgaccctggtgctatgtgcaggtgggcctaaagccgcttgtccaagagtgcatggtgcatgactgcgcagatggaaaaaagccctcctctcctccagaagaattaaaatttcagtgtggccaaaagactctgaggccccgctttaagattattgggggagaattcaccaccatcgagaaccagccctggtttgcggccatctacaggaggcaccgggggggctctgtcacctacgtgtgtggaggcagcctcatcagcccttgctgggtgatcagcgccacacactgcttcattgattacccaaagaaggaggactacatcgtctacctgggtcgctcaaggcttaactccaacacgcaaggggagatgaagtttgaggtggaaaacctcatcctacacaaggactacagcgctgacacgcttgctcaccacaatgacattgccttgctgaagatccgttccaaggagggcaggtgtgcgcagccatcccggactatacagaccatctgcctgccctcgatgtataacgatccccagtttggcacaagctgtgagatcactggctttggaaaagagaattctaccgactatctctatccggagcagctgaaaatgactgttgtgaagctgatttcccaccgggagtgtcagcagccccactactacggctctgaagtcaccaccaaaatgctgtgtgctgctgacccacagtggaaaacagattcctgccagggagactcagggggacccctcgtctgttccctccaaggccgcatgactttgactggaattgtgagctggggccgtggatgtgccctgaaggacaagccaggcgtctacacgagagtctcacacttcttaccctggatccgcagtcacaccaaggaagagaatggcctggccctctgagggtccccagggaggaaacgggcaccacccgctttcttgctggttgtcatttttgcagtagagtcatctccatcagctgtaagaagagactgggaagataggctctgcacagatggatttgcctgtgccacccaccagggcgaacgacaatagctttaccctcaggcataggcctgggtgctggctgcccagacccctctggccaggatggaggggtggtcctgactcaacatgttactgaccagcaacttgtctttttctggactgaagcctgcaggagttaaaaagggcagggcatctcctgtgcatgggtgaagggagagccagctcccccgacggtgggcatttgtgaggcccatggttgagaaatgaataatttcccaattaggaagtgtaacagctgaggtctcttgagggagcttagccaatgtgggagcagcggtttggggagcagagacactaacgacttcagggcagggctctgatattccatgaatgtatcaggaaatatatatgtgtgtgtatgtttgcacacttgtgtgtgggctgtgagtgtaagtgtgagtaagagctggtgtctgattgttaagtctaaatatttccttaaactgtgtggactgtgatgccacacagagtggtctttctggagaggttataggtcactcctggggcctcttgggtcccccacgtgacagtgcctgggaatgtattattctgcagcatgacctgtgaccagcactgtctcagtttcactttcacatagatgtccctttcttggccagttatcccttccttttagcctagttcatccaatcctcactgggtggggtgaggaccactccttacactgaatatttatatttcactatttttatttatatttttgtaattttaaataaaagtgatcaataaaatgtgatttttctgaaaaaaaaaa

SEQ ID NO: 164 - DNA, 3324 bp, Homo sapiens
  misc_feature: Incyte ID No: 2798854CB1
ggcaagttacccgtgttctgcgttgccggccgtgggtgctctggccacagtgagttaggggcgtcggagcgggtttctccaaccgcaatcggctccgctcaaggggaggaggagagtcccttctcggaagacctaaggaaacgtgtcgtctggaatgggcttgggggccacgcctgcacatctccgcgagacagagggataaagtgaagatggtgctgttattgttacctcgagtgccacatgcgatctctgagatatgtacacagtcattcttactatcgcactcagccattcttactacgctaaagaagaaataattattcgaggatatttgcctggcccagaagaaacttatgtaaatttcatgaactattatatccgttttcctcggagtgagagaaaactctttttagatatcatctgagaggtagttaatttggcaccatggggatacagggattgctacaatttatcaaagaagcttcagaacccatccatgtgaggaagtataaagggcaggtagtagctgtggatacatattgctggcttcacaaaggagctattgcttgtgctgaaaaactagccaaaggtgaacctactgataggtatgtaggattttgtatgaaatttgtaaatatgttactatctcatgggatcaagcctattctcgtatttgatggatgtactttaccttctaaaaaggaagtagagagatctagaagagaaagacgacaagccaatcttcttaagggaaagcaacttcttcgtgaggggaaagtctcggaagctcgagagtgtttcacccggtctatcaatatcacacatgccatggcccacaaagtaattaaagctgcccggtctcagggggtagattgcctcgtggctccctatgaagctgatgcgcagttggcctatcttaacaaagcgggaattgtgcaagccataattacagaggactcggatctcctagcttttggctgtaaaaaggtaattttaaagatggaccagtttggaaatggacttgaaattgatcaagctcggctaggaatgtgcagacagcttggggatgtattcacggaagagaagtttcgttacatgtgtattctttcaggttgtgactacctgtcatcactgcgtgggattggattagcaaaggcatgcaaagtcctaagactagccaataatccagatatagtaaaggttatcaagaaaattggacattatctcaagatgaatatcacggtaccagaggattacatcaacgggtttattcgggccaacaataccttcctctatcagctagtttttgatcccatcaaaaggaaacttattcctctgaacgcctatgaagatgatgttgatcctgaaacactaagctacgctgggcaatatgttgatgattccatagctcttcaaatagcacttggaaataaagatataaatacttttgaacagatcgatgactacaatccagacactgctatgcctgcccattcaagaagtcgtagttgggatgacaaaacatgtcaaaagtcagctaatgttagcagcatttggcataggaattactctcccagaccagagtcgggtactgtttcagatgccccacaattgaaggaaaatccaagtactgtgggagtggaacgagtgattagtactaaagggttaaatctcccaaggaaatcatccattgtgaaaagaccaagaagtgagctgtcagaagatgacctgttgagtcagtattctctttcatttacgaagaagaccaagaaaaatagctctgaaggcaataaatcattgagcttttctgaaatgtttgtgcctgacctggtaaatggacctactaacaaaaagagtgtaagcactccacctaggacgagaaataaatttgcaacatttttacaaaggaaaaatgaagaaagtggtgcagttgtggttccagggaccagaagcaggtttttttgcagttcagattctactgactgtgtatcaaacaaagtgagcatccagcctctggatgaaactgctgtcacagataaagagaacaatctgcatgaatcagagtatggagaccaagaaggcaagagactggttgacacagatgtagcacgtaattcaagtgatgacattccgaataatcatattccaggtgatcatattccagacaaggcaacagtgtttacagatgaagagtcctactcttttaagagcagcaaatttacaaggaccatttcaccacccactttgggaacactaagaagttgttttagttggtctggaggtcttggagatttttcaagaacgccgagcccctctccaagcacagcattgcagcagttccgaagaaagagcgattcccccacctctttgcctgagaataatatgtctgatgtgtcgcagttaaagagcgaggagtccagtgacgatgagtctcatcccttacgagaagaggcatgttcttcacagtcccaggaaagtggagaattctcactgcagagttcaaatgcatcaaagctttctcagtgctctagtaaggactctgattcagaggaatctgattgcaatattaagttacttgacagtcaaagtgaccagacctccaagctatgtttatctcatttctcaaaaaaagacacacctctaaggaacaaggttcctgggctatataagtccagttctgcagactctctttctacaaccaagatcaaacctctaggacctgccagagccagtgggctgagcaagaagccggcaagcatccagaagagaaagcatcataatgccgagaacaagccggggttacagatcaaactcaatgagctctggaaaaactttggatttaaaaaagattctgaaaagcttcctccttgtaagaaacccctgtccccagtcagagataacatccaactaactccagaagcggaagaggatatatttaacaaacctgaatgtggccgtgttcaaagagcaatattccagtaaatgcagactgctgcaaagcttttgcctgcaagagaatctgatcaatttgaagtccctgtttgggaatgaggcacttatcagcatgaagaattttttctcattctgtgccattttaaaaatagaatacattttgtatattgactttataattgggttgtggtttttttgctcagctttttatatttttataagaagctaaatagaagaataattgtatctctgacaggtttttggaggttttagtgttaattgggaaaatcctctggagtttataaaagtctactctaaatatttctgtaatgttgtcaagtagaaagatagtaaatggagaacgtacaatcc

SEQ ID NO: 165 - DNA, 1532 bp, Homo sapiens
  misc_feature: Incyte ID No: 227961.1
gcaagcgacgcggtatttgaatcctggaacaaggctacagcgtcgaagatccccagcgctgcggggctcggagagcagtcctaacggcgcctcgtacgctagtgtcctcccttttcagtccgcgtccctccctgggccgggctggcactcttgccttccccgtccctcatggcgctgctccgacgcccgacggtgtccagtgatttggagaatattgacacaggagttaattctaaagttaagagtcatgtgactattaggcgaactgttttagaagaaattggaaatagagttacaaccagagcagcacaagtagctaagaaagctcagaacaccaaagttccagttcaacccaccaaaacaacaaatgtcaacaaacaactgaaacctactgcttctgtcaaaccagtacagatggaaaagttggctccaaagggtccttctcccacacctgaggatgtctccatgaaggaagagaatctctgccaagctttttctgatgccttgctctgcaaaatcgaggacattgataacgaagattgggagaaccctcagctctgcagtgactacgttaaggatatctatcagtatctcaggcagctggaggttttgcagtccataaacccacatttcttagatggaagagatataaatggacgcatgcgtgccatcctagtggattggctggtacaagtccactccaagtttaggcttctgcaggagactctgtacatgtgcgttggcattatggatcgatttttacaggttcagccagtttcccggaagaagcttcaattagttgggattactgctctgctcttggcttccaagtatgaggagatgttttctccaaatattgaagactttgtttacatcacagacaatgcttataccagttcccaaatccgagaaatggaaactctaattttgaaagaattgaaatttgagttgggtcgacccttgccactacacttcttaaggcgagcatcaaaagccggggaggttgatgttgaacagcacactttagccaagtatttgatggagctgactctcatcgactatgatatggtgcattatcatccttctaaggtagcagcagctgcttcctgcttgtctcagaaggttctaggacaaggaaaatggaacttaaagcagcagtattacacaggatacacagagaatgaagtattggaagtcatgcagcacatggccaagaatgtggtgaaagtaaatgaaaacttaactaaattcatcgccatcaagaataagtatgcaagcagcaaactcctgaagatcagcatgatccctcagctgaactcaaaagccgtcaaagaccttgcctccccactgataggaaggtcctaggctgccgtggcccctggggatgtgtgcttcattgtgccctttttcttattggtttagaactcttgattttgtacatagtcctctggtctatctcatgaaacctcttctcagaccagttttctaaacatatattgaggaaaaataaagcgattggtttttcttaaggt

SEQ ID NO: 166 - DNA, 1639 bp, Homo sapiens
  misc_feature: Incyte ID No: 1427470CB1
  unsure 1627: a, t, c, g, or other
ttttgggtggagctgaagcacactgcttattaaagtacactattcaggcatatcatgtaggtttactttctgtgtttctagagaccaagaagcgggacgttcaccatgggaagaaaatcgctgtaccttctgattgtggggatcctcatagcatattatatttatacgcctctcccagataacgttgaggagccatggagaatgatgtggataaacgcacatctgaaaactatacaaaatttggctacatttgtggagctcctgggacttcaccattttatggattcctttaaggttgtcgggagctttgatgaagtcccaccaacctcagatgaaaatgtcactgtgactgagacaaaattcaacaacattcttgttcgggtatatgtgccaaagagaaagtctgaagcactaagaagggggttgttttacatccatggtggaggctggtgcgtgggaagtgctgctctaagtggttatgacttgctgtcaagatggacagcagacagacttgatgctgtcgtcgtatcaaccaactacagattagcacctaagtatcatttcccaattcaatttgaagatgtatataatgccttaaggtggttcttacgtaaaaaagttcttgcaaaatatggtgtgaaccctgagagaatcggtatttctggagatagtgcaggagggaatttagctgcagcagtgactcaacagctccttgatgacccagatgtcaagatcaaactcaagatccagtctttaatttatcctgcccttcagcctcttgatgtagatttaccgtcatatcaagaaaattcaaattttctatttctatccaaatcactcatggtcagattctggagtgaatattttaccactgatagatcacttgaaaaagccatgctttccagacaacatgtacctgtggaatcaagtcatctcttcaaatttgttaattggagttccctgctccctgagaggtttataaaaggacatgtttataacaatccaaattatggcagttctgagctggctaaaaaatatccagggttcctagatgtgagggcagcccctttgttggctgatgacaacaaattacgtggcttacccctgacctatgtcatcacctgtcaatatgatctcttaagagatgatggactcatgtatgtcacccgacttcgcaacactggggttcaggtgactcataaccatgttgaggatggattccatggagcattttcatttctgggacttaaaattagtcacagacttataaatcagtatattgagtggctaaaggaaaatctatagtaaaacatgtagctataacatattttaaaaataaaatctgaaaacctcagaaaatttgcattagaaattggtctttcttagaatggtctagttaagttccacatgtagcataattcttaaataggcacttttctgttttttttttcttactgtgggatttcatttcaattttctacattgtctatctgctttttctgagattttccttcttacactgttaatcttattttaaaaaatattacattcttgtatactttatttttgtgagttggctactatttacgatgcaagagaataaatgtgagcaaatattgccgaatgnctgaaaaaaaaa

SEQ ID NO: 167 - DNA, 1829 bp, Homo sapiens
  misc_feature: Incyte ID No: 206250.6
gggaaggaagggaagtaagcagtcacagacgctggcggccaccagaagtttgagcctctttggtagcaggaggctggaagaaaggacagaagtagctctggctgtgatggggatcttactgggcctgctactcctggggcacctaacagtggacacttatggccgtcccatcctggaagtgccagagagtgtaacaggaccttggaaaggggatgtgaatcttccctgcacctatgaccccctgcaaggctacacccaagtcttggtgaagtggctggtacaacgtggctcagaccctgtcaccatctttctacgtgactcttctggagaccatatccagcaggcaaagtaccagggccgcctgcatgtgagccacaaggttccaggagatgtatccctccaattgagcaccctggagatggatgaccggagccactacacgtgtgaagtcacctggcagactcctgatggcaaccaagtcgtgagagataagattactgagctccgtgtccagaaactctctgtctccaagcccacagtgacaactggcagcggttatggcttcacggtgccccagggaatgaggattagccttcaatgccaggctcggggttctcctcccatcagttatatttggtataagcaacagactaataaccaggaacccatcaaagtagcaaccctaagtaccttactcttcaagcctgcggtgatagccgactcaggctcctatttctgcactgccaagggccaggttggctctgagcagcacagcgacattgtgaagtttgtggtcaaagactcctcaaagctactcaagaccaagactgaggcacctacaaccatgacataccccttgaaagcaacatctacagtgaagcagtcctgggactggaccactgacatggatggctaccttggagagaccagtgctgggccaggaaagagcctgcctgtctttgccatcatcctcatcatctccttgtgctgtatggtggtttttaccatggcctatatcatgctctgtcggaagacatcccaacaagagcatgtctacgaagcagccagggcacatgccagagaggccaacgactctggagaaaccatgagggtggccatcttcgcaagtggctgctccagtgatgagccaacttcccagaatctgggcaacaactactctgatgagccctgcataggacaggagtaccagatcatcgcccagatcaatggcaactacgcccgcctgctggacacagttcctctggattatgagtttctggccactgagggcaaaagtgtctgttaaaaatgccccattaggccaggatctgctgacataattgcctagtcagtccttgccttctgcatggccttcttccctgctacctctcttcctggatagcccaaagtgtccgcctaccaacactggagccgctgggagtcactggctttgccctggaatttgccagatgcatctcaagtaagccagctgctggatttggctctgggcccttctagtatctctgccgggggcttctggtactcctctctaaataccagagggaagatgcccatagcactaggacttggtcatcatgcctacagacactattcaactttggcatcttgccaccagaagacccgagggaggctcagctctgccagctcagaggaccagctatatccaggatcatttctctttcttcagggccagacagcttttaattgaaattgttatttcacaggccagggttcagttctgctcctccactataagtctaatgttctgactctctcctggtgctcaataaatatctaatcataacagc

SEQ ID NO: 168 - DNA, 1438 bp, Homo sapiens
  misc_feature: Incyte ID No: 995068.15
tcgggcgacggtagctcgagacccgggactccgcccgcctccccgcgagtatttgaagtccggggcggctccggcgcctctgcccgccgttctgctcgctcgctccccgctctggagtacgtgtctggcttgggagccgctcggacacgctgggcttgggtctgccatcatggatgttctcgcagaagcaaatggcacctttgccttaaaccttttgaaaacactgggtaaagacaactcgaagaatgtgtttttctcacccatgagcatgtcctgtgccctggccatggtctacatgggggcaaagggaaacaccgctgcacagatggcccagatactttctttcaataaaagtggcggtggtggagacatccaccagggcttccagtctcttctcaccgaagtgaacaagactggcacgcagtacttgcttaggatggccaacaggctctttggggaaaagtcttgtgatttcctctcatcttttagagattcctgccaaaaattctaccaagcagagatggaggagcttgactttatcagcgccgtagagaagtccagaaaacacataaacacctgggtagctgaaaagacagaaggtaaaattgcggagttgctctctccgggctcagtggatccattgacaaggctggttctggtgaatgctgtctatttcagaggaaactgggatgaacagtttgacaaggagaacaccgaggagagactgtttaaagtcagcaagaatgaggagaaacctgtgcaaatgatgtttaagcaatctacttttaagaagacctatataggagaaatatttacccaaatcttggtgcttccatatgttggcaaggaactgaatatgatcatcatgcttccggacgagaccactgacttgagaacggtggagaaagaactcacttacgagaagttcgtagaatggacgaggctggacatgatggatgaagaggaggtggaagtgtccctcccgcggtttaaactagaggaaagctacgacatggagagtgtcctgcgcaacctgggcatgactgatgccttcgagctgggcaaggcagacttctctggaatgtcccagacagacctgtctctgtccaaggtcgtgcacaagtcttttgtggaggtcaatgaggaaggcacggaggctgcagccgccacagctgccatcatgatgatgcggtgtgccagattcgtcccccgcttctgcgccgaccaccccttccttttcttcatccagcacagcaagaccaacgggattctcttctgcggccgcttttcctctccgtgaggacagggcagtcttggtgtgcagcccctctcctctctgtcccctgacactccacagtgtgcctgcaacccaagtggccttatccgtgcagtggtggcagttcagaaataaagggcccatttgtgggatgccgcattc

SEQ ID NO: 169 - DNA, 3248 bp, Homo sapiens
  misc_feature: Incyte ID No: 2545475CB1
gctgcgacgtgactggctagctgcgtgggtactggaacaagcaaacgaggcagcgagcgaaggacgggagccggaccctgggccccgtggaactccagcctgcgccaccacgtcacgcacacgctcggcgctgcgatccgcgcatataacgatatttggatttgacctgcattttggaatttatctacacttaaaatgccaccagcagttggaggtccagttggatacacccccccagatggaggctggggctgggcagtggtaattggagctttcatttccatcggcttctcttatgcatttcccaaatcaattactgtcttcttcaaagagattgaaggtatattccatgccaccaccagcgaagtgtcatggatatcctccataatgttggctgtcatgtatggtggaggtcctatcagcagtatcctggtgaataaatatggaagtcgtatagtcatgattgttggtggctgcttgtcaggctgtggcttgattgcagcttctttctgtaacaccgtacagcaactatacgtctgtattggagtcattggaggtcttgggcttgccttcaacttgaatccagctctgaccatgattggcaagtatttctacaagaggcgaccattggccaacggactggccatggcaggcagccctgtgttcctctgtactctggcccccctcaatcaggttttcttcggtatctttggatggagaggaagctttctaattcttgggggcttgctactaaactgctgtgttgctggagccctcatgcgaccaatcgggcccaagccaaccaaggcagggaaagataagtctaaagcatcccttgagaaagctggaaaatctggtgtgaaaaaagatctgcatgatgcaaatacagatcttattggaagacaccctaaacaagagaaacgatcagtcttccaaacaattaatcagttcctggacttaaccctattcacccacagaggctttttgctatacctctctggaaatgtgatcatgttttttggactctttgcacctttggtgtttcttagtagttatgggaagagtcagcattattctagtgagaagtctgccttccttctttccattctggcttttgttgacatggtagcccgaccatctatgggacttgtagccaacacaaagccaataagacctcgaattcagtatttctttgcggcttccgttgttgcaaatggagtgtgtcatatgctagcacctttatccactacctatgttggattctgtgtctatgcgggattctttggatttgccttcgggtggctcagctccgtattgtttgaaacattgatggaccttgttggaccccagaggttctccagcgctgtgggattggtgaccattgtggaatgctgtcctgtcctcctggggccaccacttttaggtcggctcaatgacatgtatggagactacaaatacacatactgggcatgtggcgtcgtcctaattatttcaggtatctatctcttcattggcatgggcatcaattatcgacttttggcaaaagaacagaaagcaaacgagcagaaaaaggaaagtaaagaggaagagaccagtatagatgttgctgggaagccaaatgaagttaccaaagcagcagaatctccggaccagaaagacacagaaggagggcccaaggaggaggaaagtccagtctgaatccatggggctgaagggtaaattgagcagttcatgacccaggatatctgaaaatattctactggcctgtaatctaccagtggtgctcaatgcaaatagtagacatttgtgtggaaatcataccagttgttcattgatgggatttttgtttgactccttaccaatagcctgaatttgaggagggaatgattggtagcaaaggatgggggaaagaagtaggttctgttttgttttgttttaatcttagcttttaatagtgtcataaagattataatatgtgccttaagttttagtctttagaactctagagagccttaacttcttaaaccatttttgctgaattcatctatttcgagtgttgtgttaaaaggaaaaataacaactaacttgtttgaggcaaatctaaaatttaaaattaatcttgcttcattgttacatgtaatatatttcagacattttcactggaagatttatgaacagaaatattggttgaaagttagagattttacaaaatgctgacaaaaatattttcctagcatcagtagatttctggcatatgtttctgctagctatatatttaggaaattcaaagcataaaactttggcaacatcttggctgttctagacacagtgtacttgtcaacccctctcaggtaccttttcttgggatgcttattagaagccaagtaaagtgcttaaggtttgttttcattaaattagctatttctgctcccctgttcaaagatgcattttgagtgtttatagatcactgccctttttgaaatcacctggtattatttttcttactggaaaagttagtattaaaatctacagaactacatatttgtgcctccttggtaaatacaacacatctaattaaatgtagacagatatttcaaacatcagctgaattcacttaagtttttccaaaacctcagttaaactgtgaagctattggaatttttttttcctggaatttttcccctttgattcacagtggtcccatttatatctgcttctagcttagtgctatgtgtgagatatgtgtgtgtttggtgtttttgtttttttgtttttttttttttaaggtttgcaaattaaaaagggccagaaaaatttggcaccaggcaaacgaataaagataggattgggaaagaagttgctaagtgtgcttagttttaataagtaattccttctcttttttcagagaaggccttacagaaaattgttgtgcttagaattgctggatgcatttttaccctccacacaaacctaaaaattttgtgacccctttcacttacctgaaaagtagagaaatggattcagtataaggataaggagggaaggtggaccagaatgaaaactgtaaatatttttttaacctaatatcacttaaatcgaggcagaaagatatagacattcaatgaattatattcaatgcatttaaaataccactgtaattgacagagtaaaagtatagatacaaaaccttgtgtaagaggctgacttttccaaataaacattttttaagaaaacaaaaaaaaaaaaaa

SEQ ID NO: 170 - DNA, 1705 bp, Homo sapiens
  misc_feature: Incyte ID No: 1502559CB1
gccgtcctccccaaccctcgtcctctggccgcgcctgcggcgcacgcccagcgcccctcgcctaacctcgcgcccgggccgcgcctcctcctcctcctgctccccgccgcttccgtttctcgagggaaaggctgctgcctcctgctctgtcctcatccccggcttagctgacggcccagagggtgggtgccaattccaccagcagctgcaactgaaaagcaaggttcagaaatgtcagatatcctccgggagctgctctgtgtctctgagaaggctgctaacattgcccgggcgtgcagacagcaggaagccctcttccagctgctgatcgaagaaaagaaagagggagaaaagaacaagaagtttgcagttgacttcaagacgctggctgatgtactggtacaggaagttataaaacagaatatggagaacaagtttccaggcttggaaaaaaatatttttggagaagaatccaatgagtttactaatgactggggggaaaagattaccttgaggttgtgttcaacagaggaagaaacagcagagcttcttagcaaagtcctcaatggtaacaaggtagcatctgaagcattagccagggttgttcatcaggatgttgcctttactgacccaactctggattccacagagatcaatgttccacaggacattttgggaatttgggtggaccccatagattcaacttatcagtatataaaaggttctgctgacattaaatccaaccagggaatcttcccctgtggacttcagtgtgtcaccattttaattggtgtctatgacatacagacaggggttcccctgatgggagtcatcaatcaaccttttgtgtcacgagatccaaacaccctcaggtggaaaggacagtgctattggggcctttcttacatggggaccaacatgcattcactacagctcaccatctctagaagaaacggcagtgaaacacacactggaaacaccggctctgaggcagcattctcccccagtttttcagccgtaattagtacaagtgaaaaggagactatcaaagctgcattgtcacgtgtgtgtggagatcgcatatttggggcagctggggctggttataagagcctatgtgttgtccaaggcctcgttgacatttacatcttttcagaagataccacattcaaatgggactcttgtgctgctcatgccatactgcgggccatgggtgggggaatagtagacttgaaagaatgcttagaaagaaatccagaaacagggcttgatttgccacagttggtgtaccacgtggaaaatgagggtgctgctggggtggatcggtgggccaacaagggaggactcattgcatacagatccaggaagcggctggagacattcctgagcctcctggtccaaaacctggcacctgcagagacgcatacctagaggaactctaaccccggtgtacctgtataaactgaactgtgaaactgtttcggttatctctgtcttttgaggatggctttgtcctgttgctggttaacattcaccttcctcttttgaggagtatttttccattatgtattcataataatgttaatttcaataaatgacattcatgcagcaattatattggtgtatgaaattcttacagtgaatattgtgctgttagtgctgcttgaaacatttcaataaaatattgaccaggaaaaaaaaaaaa

SEQ ID NO: 171 - DNA, 2047 bp, Homo sapiens
  misc_feature: Incyte ID No: 2239738CB1
ggtgcgcgcctgggacctgaacatggacttcccgtgcctctggctagggctgttgctgcctttggtagctgcgctggatttcaactaccaccgccaggaagggatggaagcgtttttgaagactgttgcccaaaactacagttctgtcactcacttacacagtattgggaaatctgtgaaaggtagaaacctgtgggttcttgttgtggggcggtttccaaaggaacacagaattgggattccagagttcaaatacgtggcaaatatgcatggagatgagactgttgggcgggagctgctgctccatctgattgactatctcgtaaccagtgatggcaaagaccctgaaatcacaaatctgatcaatagtacccggatacacatcatgccttccatgaacccagatggatttgaagccgtcaaaaagcctgactgttattacagcatcggaagggaaaattataaccagtatgacttgaatcgaaatttccccgatgcttttgaatataataatgtctcaaggcagcctgaaactgtggcagtcatgaagtggctgaaaacagagacgtttgtcctctctgcaaacctccatggtggtgccctcgtggccagttacccatttgataatggtgttcaagcaactggggcattatactcccgaagcttaacgcctgatgatgatgtttttcaatatcttgcacatacctatgcttcaagaaatcccaacatgaagaaaggagacgagtgtaaaaacaaaatgaactttcctaatggtgttacaaatggatactcttggtatccactccaaggtggaatgcaagattacaactacatctgggcccagtgttttgaaattacgttggagctgtcatgctgtaaatatcctcgtgaggagaagcttccatccttttggaataataacaaagcctcattaattgaatatataaagcaggtgcacctaggtgtaaagggtcaagtttttgatcagaatggaaatccattacccaatgtaattgtggaagtccaagacagaaaacatatctgcccctatagaaccaacaaatatggagagtattatctccttctcttgcctgggtcttatataataaatgttacagtccctggacatgatccacacatcacaaaggtgattattccggagaaatcccagaacttcagtgctcttaaaaaggatattctacttccattccaagggcaattggattctatcccagtatcaaatccttcatgcccaatgattcctctatacagaaatttgccagaccactcagctgcaacaaagcctagtttgttcttatttttagtgagtcttttgcacatattcttcaaataaagtaaaatgtgaaactcaacccacatcaccacctggaatcagggattgctcactccaggttactgcaaccctaactcactctagtgggaccttgactggagaaactccacgatcttcctgaagaagagaaatggatgtttccaaattccacaataagcaatatgtggtgataatgaaaagaatgattcagtcttgacggtgaatggaagacacttacctaacaagtactgctcatttacactcaaattaatcttgaagtagtcttaaaatgtgtaagaagttaaaacttgagaagcaaaaaaatgcctgcaaaaagaagatcattttgtatacagagaaccggatgaatataagcaatgaagatgaacatttattgatcttctacatacaagacttcaccataaggccaggagcagtggctcacaccttgtaatcccagcactttgggaggccaaggtgggcggatcaccttgaggtcaggagttcaaaaccagcctgaccaacatggtgaaaccctgtctctacttgggggtagcggggtgtggtggcgggcacctgtaatcgcagcctttcaggaggctgagacaggagaatcgcttgaaccctagaggcggagtttgcagtgagccgagatagtgccattgtactccagcttgggcaacagagtaaactctgctcaaaaaaaaaaaaaaa

SEQ ID NO: 172 - DNA, 3324 bp, Homo sapiens
  misc_feature: Incyte ID No: 347572.1
gtcattcagtggatgtgatcttggctcacaggggacgatgtcaagctcttcctggctccttctcagccttgttgctgtaactgctgctcagtccaccattgaggaacaggccaagacatttttggacaagtttaaccacgaagccgaagacctgttctatcaaagttcacttgcttcttggaattataacaccaatattactgaagagaatgtccaaaacatgaataatgctggggacaaatggtctgcctttttaaaggaacagtccacacttgcccaaatgtatccactacaagaaattcagaatctcacagtcaagcttcagctgcaggctcttcagcaaaatgggtcttcagtgctctcagaagacaagagcaaacggttgaacacaattctaaatacaatgagcaccatctacagtactggaaaagtttgtaacccagataatccacaagaatgcttattacttgaaccaggtttgaatgaaataatggcaaacagtttagactacaatgagaggctctgggcttgggaaagctggagatctgaggtcggcaagcagctgaggccattatatgaagagtatgtggtcttgaaaaatgagatggcaagagcaaatcattatgaggactatggggattattggagaggagactatgaagtaaatggggtagatggctatgactacagccgcggccagttgattgaagatgtggaacatacctttgaagagattaaaccattatatgaacatcttcatgcctatgtgagggcaaagttgatgaatgcctatccttcctatatcagtccaattggatgcctccctgctcatttgcttggtgatatgtggggtagattttggacaaatctgtactctttgacagttccctttggacagaaaccaaacatagatgttactgatgcaatggtggaccaggcctgggatgcacagagaatattcaaggaggccgagaagttctttgtatctgttggtcttcctaatatgactcaaggattctgggaaaattccatgctaacggacccaggaaatgttcagaaagcagtctgccatcccacagcttgggacctggggaagggcgacttcaggatccttatgtgcacaaaggtgacaatggacgacttcctgacagctcatcatgagatggggcatatccagtatgatatggcatatgctgcacaaccttttctgctaagaaatggagctaatgaaggattccatgaagctgttggggaaatcatgtcactttctgcagccacacctaagcatttaaaatccattggtcttctgtcacccgattttcaagaagacaatgaaacagaaataaacttcctgctcaaacaagcactcacgattgttgggactctgccatttacttacatgttagagaagtggaggtggatggtctttaaaggggaaattcccaaagaccagtggatgaaaaagtggtgggagatgaagcgagagatagttggggtggtggaacctgtgccccatgatgaaacatactgtgaccccgcatctctgttccatgtttctaatgattactcattcattcgatattacacaaggaccctttaccaattccagtttcaagaagcactttgtcaagcagctaaacatgaaggccctctgcacaaatgtgacatctcaaactctacagaagctggacagaaactgttcaatatgctgaggcttggaaaatcagaaccctggaccctagcattggaaaatgttgtaggagcaaagaacatgaatgtaaggccactgctcaactactttgagcccttatttacctggctgaaagaccagaacaagaattcttttgtgggatggagtaccgactggagtccatatgcagaccaaagcatcaaagtgaggataagcctaaaatcagctcttggagataaagcatatgaatggaacgacaatgaaatgtacctgttccgatcatctgttgcatatgctatgaggcagtactttttaaaagtaaaaaatcagatgattctttttggggaggaggatgtgcgagtggctaatttgaaaccaagaatctcctttaatttctttgtcactgcacctaaaaatgtgtctgatatcattcctagaactgaagttgaaaaggccatcaggatgtcccggagccgtatcaatgatgctttccgtctgaatgacaacagcctagagtttctggggatacagccaacacttggacctcctaaccagccccctgtttccatatggctgattgtttttggagttgtgatgggagtgatagtggttggcattgtcatcctgatcttcactgggatcagagatcggaagaagaaaaataaagcaagaagtggagaaaatccttatgcctccatcgatattagcaaaggagaaaataatccaggattccaaaacactgatgatgttcagacctccttttagaaaaatctatgtttttcctcttgaggtgattttgttgtatgtaaatgttaatttcatggtatagaaaatataagatgataaagatatcattaaatgtcaaaactatgactctgttcagaaaaaaaattgtccaaagacaacatggccaaggagagagcatcttcattgacattgctttcagtatttatttctgtctctggatttgacttctgttctgtttcttaataaggattttgtattagagtatattagggaaagtgtgtatttggtctcacaggctgttcagggataatctaaatgtaaatgtctgttgaatttctgaagttgaaaacaaggatatatcattggagcaagtgttggatcttgtatggaatatggatggatcacttgtaaggacagtgcctgggaactggtgtagctgcaaggattgagaatggcatgcattagctcactttcatttaatccattgtcaaggatgacatgctttcttcacagtaactcagttcaagtactatggtgatttgcctacagtgatgtttggaatcgatcatgctttcttcaaggtgacaggtctaaagagagaagaatccagggaacaggtagaggacattgctttttcacttccaaggtgcttgatcaacatctccctgacaacacaaaactagagccaggggcctccgtgaactcccagagcatgcctgatagaaactcatttctactgttctctaactgtggagtgaatggaaattccaactgtatgttcaccctctgaagtgggtacccagtctcttaaatcttttgtatttgctcacagtgtttgagcagtgctgagcacaaaccagacactcaataaatgctagatttacaaa

SEQ ID NO: 173 - DNA, 1779 bp, Homo sapiens
  misc_feature: Incyte ID No: 977985.10
caggaacacagacccaaaccataccacacacattatcattgttagactttgtaaagtatttaaggtacatggaacacacgggaagtctggtagctcagcccatttctttattgcatctgttattcaccatgtaattcaggtaccacgtattccagggagcctttcttggccctcagtttgcagtatacacactttccaagtactcttgtagcatcctgtttgtatcatagcactggtcacattgccttacctaaatctgtttgacagtctgctcaacacgactgcaagctccatgaggcagggacatcatctcttccatctttgggtccttagtgcaatacctggcagctagccagtgctcagctaaatatttgttgactgaataaatgaatgcacaaccaaattattgataccaaatgttttttttgtgtacatttctacttctctagctataagtcttaattatacaacaaaatactatttttatatttatgtttggtaaattcaataactttcctcatcatttggaaagtcaaattgtttattgcttccctacagttttttctgaatctagcaggattttaatgatatcattataatttgacacaataaaaggacaacatgaaactgatgaatctttattgggttaatttcagacactatataatcttttaaaaatgtaacattcttttttatatataaataattggtggcatcacaaatagccaaagcagggtggagagagtgatccttcctgggtgcaggcaagaaggggatatgttttctacagagttttcaaaacagtgataaagctgtctacaagtcattgtgctttttatcatcactatgcccagacaatgtgaaacatcagagatgaagtgctcttcccacagaggtggactgatccttctccccactcccttggtgtgtctctgaatgcaatgttgtcttggaaaacagctttccaagcatttcactcctgagcacttgccagtttcctcacttgttcttcacatatccaggcaaagacatcctgtttgctatatgaagcattgtatcccgtataaaaggaaggaaagagagaaatatatttttacactcatcactcctcaggggctgtacaatcatgtagaaattgtttaatgtgcctgtcaaatagccaaagagtgttaaaccctgagttcccacccatgtgtgtggtatggttaggattcatccagatacacagagagaggcacaacaggaggagaaaggataggggtgtggggacagcgggcccccaatatggtgtaatcgtggcaggtctctgcctgaagtgctatgtggggtttttcttgttttaattttgactttaacccctgatttgtaagtttttcataaaataaacagaatcataactcatgtagatggctataagtgccgtagtgttctgtgggtctctggtgtctgccagtgataagtgtggcaccccaggaaggctgtggaccccatcaaggtgctatgtgagggccatgcttggggtggtggtgggcccagtagaccctgcagccatccatccagcctgcccactcacactgcccttgtgtactcctgctttgctacgttatcattgatcaatgtccctggttacctatgtgtttgaattatcttcgtgttacaggtgtttaatgattttgctccttctagcttatttgtatttcacctgtttttctttaaatcaacatggttacactctgtttcagcaactgtataaattaaacacaaattattactactgct

SEQ ID NO: 174 - DNA, 585 bp, Homo sapiens
  misc_feature: Incyte ID No: 236582.2
agcgcagtggccactatggggtctgggctgccccttgtcctcctcttgaccctccttgggcagctcacatggaacaggtgagggctagagggcaggactcctgggtccctgtggcaagaagaggccagagaaaaggggtgggacttcatggtccctgagagtgacagagacaccccagtcctgagcttccaagaggctctggaggggcattgctggggaagaggaactgtgccggggagccgtgagcaggaaggttctgtgtctccggaggaatcagccctgactgctgggtcctaagctgtacttctggatccgcagggccgggtatgactttgcaactgaagctgaaggagtcttttctgacaaattcctcctatgagtccagcttcctggaattgcttgaaaagctctgcctcctcctccatctcccttcagggaccagcgtcaccctccaccatgcaagatctcaacaccatgttgtctgcaacacatgacagccattgaagcctgtgtccttcttggcccgggcttttgggccggggatgcaggaggcaggccccgaccctgtctttcagcaggccccca

SEQ ID NO: 175 - DNA, 1990 bp, Homo sapiens
  misc_feature: Incyte ID No: 403676.1
  unsure 1611, 1959: a, t, c, g, or other
gttaaggatgttttcatttatgtttattggtgacactggtgtatggcactcttttcctgtgagtcttgctgtgactttgatatgagggtaatgccagttctgtaaatgggctggaaagtcttccctcctctcttcttgtctgaaagagctttcaaaatatttgatagaattcaccagtgaagatatctgggctttggcatttctttttgagaaggtttttcaatttctgacttagttcacagttctcttcaggttttccagttaatttgggtcagttttggcaatttctatctctgcacgaattggtcctttttatccaagtggtctaacttattggcttcaggtttttcagagtattcacttataatgttttttaacttcctaagggtcattagtgataatctctcttttgttcacaattttggtaatttatcttatttctcataatctcttttttcactgttggtcaagaaaacagacagaggcagcagatggagatgtgacagattctctagtgggaaggctttgatcataatacctggcaagccagaatgatgccagcaaccccaaaggagctgccaatggatcttgacaggaaaatcactgactctggattgggctatgctcaaccaggggtagatgtcaatgcttcaagggctatacaagaaccagaaaagaagagattgcaccaatttggactgccgagtcacacttctttacacaagaaaacacactttacagcctcaaatggccaacaatgcagagggacatgtcctcctcaggggaaaatttgatagaaaattgaaatggtcaattgaaacattgtttgtctaaaaactgccaatctaattgttgggcaatataaacatgaaggactggcttttatatcttcatgaatgtgctcgctgtcaacatgagtggggctgcaagaataactccactaggtagcatcctctcttttacctgatggatcaggacgatgctgttatgacgatacatacaattcttctgaagaggagaggatgctggaataaagactacacttcacctcaaatttattttttcatatgttatgccatagtaccaggaatagggatgtaaataaaagtgccagaaacaggaattatccctaagcgaaaaaccataactatatttttatacctttatgtaagaattctcaagtattcatttcatctggaaaagttaggattaacagtaagtagagttatatagcctggtggtctgatagcccccactagttccttacctatataacctaccctctatgatcaagactagactgagggaagacatgctagaatactattgctgcctgcagtctaggccagcccagcagacaaacctaatgtcactcccaaacctggaaacaactgatataaagggacagagggaggaatagtggctgagggtaagtgataaatcaaagggttatataatgagaaaattcaatattagcttaactcctcaaaggtggtgtgagcaagagaagatattgtcacttaggtcaattatacgggatgcctaaaagagtgaagctgtatgtccctgagaccatccttgtttttggaacctggtaagattgagtgttgntcagcaaagctgagtgatttcattctgggagacatattcatacaagaggatgataaactggcctaattttgaatgaatggatgagactctgataatatgccaatacctctttactgttacaatcctttttcctgtaaaagatatgtggtcaaagaaaagtgggcaatctgagttatcacaaaaacatttagtctttgtccctggtttctcctaaaaaccttagactctcttgagtgataagagtgtctttagagtactgatgagaagactcttggctgagtggatcctggatatcttaagaacggtggctagctgccagagacacatacctgtgatgcgagggttatntttttccattttgtgttgctataaagaaatg

SEQ ID NO: 176 - DNA, 1813 bp, Homo sapiens
  misc_feature: Incyte ID No: 138472CB1
tacggatcactatagggaatttggccctcgagcaggaattcggcacgaggaaatccacaaggactcaccagtctcctggtctgcagagaagacagaatcaacatgagcacagcaggaaaagtaatcaaatgcaaagcagctgtgctatgggagttaaagaaacccttttccattgaggaggtggaggttgcacctcctaaggcccatgaagttcgtattaagatggtggctgtaggaatctgtggcacagatgaccacgtggttagtggtaccatggtgaccccacttcctgtgattttaggccatgaggcagccggcatcgtggagagtgttggagaaggggtgactacagtcaaaccaggtgataaagtcatcccactcgctattcctcagtgtggaaaatgcagaatttgtaaaaacccggagagcaactactgcttgaaaaacgatgtaagcaatcctcaggggaccctgcaggatggcaccagcaggttcacctgcaggaggaagcccatccaccacttccttggcatcagcaccttctcacagtacacagtggtggatgaaaatgcagtagccaaaattgatgcagcctcgcctctagagaaagtctgtctcattggctgtggattttcaactggttatgggtctgcagtcaatgttgccaaggtcaccccaggctctacctgtgctgtgtttggcctgggaggggtcggcctatctgctgttatgggctgtaaagcagctggagcagccagaatcattgcggtggacatcaacaaggacaaatttgcaaaggccaaagagttgggtgccactgaatgcatcaaccctcaagactacaagaaacccatccaggaagtgctaaaggaaatgactgatggaggtgtggatttttcgtttgaagtcatcggtcggcttgacaccatgatggcttccctgttatgttgtcatgaggcatgtggcacaagcgtcatcgtaggggtacctcctgcttcccagaacctctcaataaaccctatgctgctactgactggacgcacctggaagggggctgtttatggtggctttaagagtaaagaaggtatcccaaaacttgtggctgattttatggctaagaagttttcactggatgcgttaataacccatgttttaccttttgaaaaaataaatgaaggatttgacctgcttcactctgggaaaagtatccgtaccgtcctgacgttttgaggcaatagagatgccttcccctgtagcagtcttcagcctcctctaccctacaagatctggagcaacagctaggaaatatcattaattcagctcttcagagatgttatcaataaattacacatgggggctttccaaagaaatggaaattgatgggaaattatttttcaggaaaatttaaaattcaagtgagaagtaaataaagtgttgaacatcagctggggaattgaagccaacaaaccttccttcttaaccattctactgtgtcacctttgccattgaggaaaaatattcctgtgacttcttgcatttttggtatcttcataatctttagtcatcgaatcccagtggaggggacccttttacttgccctgaacatacacatgctgggccattgtgattgaagtcttctaactctgtctcagttttcactgtcgacattttcctttttctaataaaaatgtaccaaatccctggggtaaaagctagggtaaggtaaaggatagactcacatttacaagtagtgaaggtccaagagttctaaatacaggaaatttcttaggaactcaaataaaatgccccacat

SEQ ID NO: 177 - DNA, 886 bp, Homo sapiens
  misc_feature: Incyte ID No: 253672.11
gggggggggcagggtaggtggggctttccctaatttatcttcatgtccagtgagcagtgttgcgtttttccttgtagcatttggaaatgatttactggaattacaaaacctatttttcctttaaatttcagctttggctctggctgctttttagaataatgcaagataaaaatcacacctgagggctgaaaacggagagggaatgggagacttgatatttaagcagcttgaatggtttttcttttctttatttttaaagaaatgcacttgcctatgatactgtctctccagtgaaatgattactcctccattactctattgatacaatattgtgcatgctagtgttgtatttctatacagtagcttgaaattgattaacttatactgtaggtgttatgtattcctatgacaaaaaaaattaagtcttcaaattttttaaaggttttttttttaatttaatttttccttttgggggtaaagtttgctctaccaaatagtgattgtaacaaattgatctgttttggatgttgctatagtgacatgcagttatatattttgtttttaaaagggggggagcaaaagaaacaccagtgttagcttaatcttaatgtctggtgtttgtcatggtgaaattataactattacagtgttggagaacaacaaatatgttctctgaatgagcctttgtgctttttgtcatgttatgcagtgaactatttttaaggtctaatcagtgattatttttccagctccgtgtttctctaaggaattatttcacacacggaccatctttagcagtttcctcagtgatggaatatcatgaatgtgagtcattatgtagctgtcgtacattgagcaaataaacttacagatctgacgccagtgc

SEQ ID NO: 178 - DNA, 3469 bp, Homo sapiens
  misc_feature: Incyte ID No: 201928.3
gtcccgcggcgggttggctcgcgcttcgttgtcagatctgaggcgaggctaggtgagccgtgggaagaaaagagggagcagctagggcgcgggtctccctcctcccggagtttggaacggctgaagttcaccttccagcccctagcgccgttcgcgccgctaggcctggcttctgaggcggttgcggtgctcggtcgccgcctaggcggggcagggtgcgagcaggggcttcgggccacgcttctcttggcgacaggattttgctgtgaagtccgtccgggaaacggaggaaaaaaagagttgcgggaggctgtcggctaataacggttcttgatacatatttgccagacttcaagatttcagaaaaggggtgaaagagaagattgcaactttgagtcagacctgtaggcctgatagactgattaaaccacagaaggtgacctgctgagaaaagtggtacaaatactgggaaaaacctgctcttctgcgttaagtgggagacaatgtcacaagttaaaagctcttattcctatgatgccccctcggatttcatcaatttttcatccttggatgatgaaggagatactcaaaacatagattcatggtttgaggagaaggccaatttggagaataagttactggggaagaatggaactggagggctttttcagggcaaaactcctttgagaaaggctaatcttcagcaagctattgtcacacctttgaaaccagttgacaacacttactacaaagaggcagaaaaagaaaatcttgtggaacaatccattccgtcaaatgcttgttcttccctggaagttgaggcagccatatcaagaaaaactccagcccagcctcagagaagatctcttaggctttctgctcagaaggatttggaacagaaagaaaagcatcatgtaaaaatgaaagccaagagatgtgccactcctgtaatcatcgatgaaattctaccctctaagaaaatgaaagtttctaacaacaaaaagaagccagaggaagaaggcagtgctcatcaagatactgctgaaaagaatgcatcttccccagagaaagccaagggtagacatactgtgccttgtatgccacctgcaaagcagaagtttctaaaaagtactgaggagcaagagctggagaagagtatgaaaatgcagcaagaggtggtggagatgcggaaaaagaatgaagaattcaagaaacttgctctggctggaatagggcaacctgtgaagaaatcagtgagccaggtcaccaaatcagttgacttccacttccgcacagatgagcgaatcaaacaacatcctaagaaccaggaggaatataaggaagtgaactttacatctgaactacgaaagcatccttcatctcctgcccgagtgactaagggatgtaccattgttaagcctttcaacctgtcccaaggaaagaaaagaacatttgatgaaacagtttctacatatgtgccccttgcacagcaagttgaagacttccataaacgaacccctaacagatatcatttgaggagcaagaaggatgatattaacctgttaccctccaaatcttctgtgaccaagatttgcagagacccacagactcctgtactgcaaaccaaacaccgtgcacgggctgtgacctgcaaaagtacagcagagctggaggctgaggagctcgagaaattgcaacaatacaaattcaaagcacgtgaacttgatcccagaatacttgaaggtgggcccatcttgcccaagaaaccacctgtgaaaccacccaccgagcctattggctttgatttggaaattgagaaaagaatccaggagcgagaatcaaagaagaaaacagaggatgaacactttgaatttcattccagaccttgccctactaagattttggaagatgttgtgggtgttcctgaaaagaaggtacttccaatcaccgtccccaagtcaccagcctttgcattgaagaacagaattcgaatgcccaccaaagaagatgaggaagaggacgaaccggtagtgataaaagctcaacctgtgccacattatggggtgccttttaagccccaaatcccagaggcaagaactgtggaaatatgccctttctcgtttgattctcgagacaaagaacgtcagttacagaaggagaagaaaataaaagaactgcagaaaggggaggtgcccaagttcaaggcacttcccttgcctcattttgacaccattaacctgccagagaagaaggtaaagaatgtgacccagattgaacctttctgcttggagactgacagaagaggtgctctgaaggcacagacttggaagcaccagctggaagaagaactgagacagcagaaagaagcagcttgtttcaaggctcgtccaaacaccgtcatctctcaggagccctttgttcccaagaaagagaagaaatcagttgctgagggcctttctggttctctagttcaggaaccttttcagctggctactgagaagagagccaaagagcggcaggagctggagaagagaatggctgaggtagaagcccagaaagcccagcagttggaggaggccagactacaggaggaagagcagaaaaaagaggagctggccaggctacggagagaactggtgcataaggcaaatccaatacgcaagtaccagggtctggagataaagtcaagtgaccagcctctgactgtgcctgtatctcccaaattctccactcgattccactgctaaactcagctgtgagctgcggataccgcccggcaatgggacctgctcttaacctcaaacctaggaccgtcttgctttgtcattgggcatggagagaacccatttctccagacttttacctacccgtgcctgagaaagcatacttgacaactgtggactccagttttgttgagaattgttttcttacattactaaggctaataatgagatgtaactcatgaatgtctcgattagactccatgtagttacttcctttaaaccatcagccggccttttatatgggtcttcactctgactagaatttagtctctgtgtcagcacagtgtaatctctattgctattgccccttacgactctcaccctctccccactttttttaaaaattttaaccagaaaataaagatagttaaatcctaagatagagattaagtcatggtttaaatgaggaacaatcagtaaatcagattctgtcctcttctctgcataccgtgaatttatagttaaggatccctttgctgtgagggtagaaaacctcaccaactgcaccagtgaggaagaagactgcgtggattcatggggagcctcacagcagccacgcagcaggctctgggtggggctgccgttaaggcacgttctttccttactggtgctgataacaacagggaaccgtgcagtgtgcattttaagacctggcctggaataaatacgttttgtctttccctcaa

SEQ ID NO: 179 - DNA, 1568 bp, Homo sapiens
  misc_feature: Incyte ID No: 198643.1
agaagatgcatgatttcttaggatcatatgctgtttgtagccataaggtaaatcatgtctcttccaatcatgactttggaactccctgaataataaaaatgagagttgagataaataggggaaaaaaaatttttttcaagccagagctatgcatatgttaggtgatgggtagtatccctttaaggtctcaaacattacaacatcaattatgaaatactgataacgaaaggtagtaatgaaatatatatgatgaaaagaattgagaagttctaaattaagacatttcagttaagctcataaaatttcattgttttcatttaaaaggagattaacgttattgatacttggataactggctaatcatattaaaggactatgtggttccagctcaacttttaatatattgtctcctttaaaactatcatggttataattctattgggaaagacttttagataacaaagatttcaaatgttaaaagagataaaagtcaggttaatactatcttaaacactgagtcagaaaatcattactgtatagaagttgctttcctgatcaagtctgaacttcagctagtgctagagaactattttctatgacttaactctaaccaagttttattttaagctgtttctttgatagaagggccatgaaaatagagtaatgatatagtaggagataagggattggtttggtctttttcaataaagatagaagttgctgaagttttctgaattaataatgacttagattgtgaccttttagattcggtgttgagctctgtgttgtattacttcctaaaagataatgcttaaacattaagcattagtgtgctcttcatgttaatatggcagagttttgtaaactaaattaaaacttactgatatattggactttgagccaagggaaagaatgagtactatctttccagatatcttaagggtaaaagcttattctaagacagtctgtccattgagaatattagatttctgacttgcaaatatgtttgtactccagaagaattagaggaaaagcagatactagaattctaatttaattacatatacagccgtctttgtttatagtgtagaattctttatattttgtacaaaaactaattcttttggtaaaatgaaccatttacagttcggttttggactctgagtcaaaggattttcctttaaatgcttgtctcaattttagtctggtcttttgtacttttcttcagaagaaatgaattaaagggtacagttgcataaagtgggtttttatcctaatgtattggaaataaatgataaactttattttgtctttacttttttactttaaaactttttgatattttaggggttggagtctgataatgaaggagttgtgtgtattggactcttagtaacaattataaacgcttaacaaaatatagaaagcaatgattgggtggctctgcagagcaatcaaaacaaggtagaaactgcaaagtcctataatggaagagattcaggctgggtgtggtggctcatgcctgtttgggaggccagtatgggagaatcgcttacactcaggaattc

SEQ ID NO: 180 - DNA, 2402 bp, Homo sapiens
  misc_feature: Incyte ID No: 979448.2
gaaacgtctccaacaattggaagtggtcgaaggggatttgatgaagacagaagatgagtatgatcagctggaacagaaatttagaactgagcaggataaggctaacttcctctctcaacaactagaggagatcaagcaccaaattgccaagaataaagcaatagagaagggtgaggttgtgagccaggaagctgaactgagacacagatttcggttggaagaagctaaaagtcgagacttaaaagccgaagtacaagctcttaaagagaagattcacgaattaatgaacaaagaagatcagctttctcagctccaggtagattattctgtacttcaacaaagatttatggaagaagaaaataagaacaaaaacatggggcaggaggttctcaatctgaccaaagagttggagctttccaagcgctacagcagagctcttaggcccagtgtgaatggaagaagaatggtggatgttcctgtgacgtcaactggagtccaaactgatgcagtcagcggtgaagcagcagaggaagaaacgccagctgtattcatacggaaatccttccaggaagaaaatcatattatgagtaatcttcggcaggtgggattgaagaaacccgtggaaagatcttctgttctagacaggtatcctccagcagcaaatgagctcactatgagaaagtcttggattccatggatgagaaagagggaaaacggcccctccatcactcaggagaaagggccccgaacaaattccagtccagggcacccaggagaggtagtcctttcaccaaagcagggccagcccctgcatattcgagtgacaccagaccacgagaacagcactgcgactttggagataacaagcccgacatctgaagaatttttttctagtaccactgtcattcctaccttagggaatcagaaaccaagaataaccattattccatcaccaaacgttatgcctcaaaaacaaaaaagtggagatactactcttggcccagaacgagccatgtccccagtcacaattactacattttccagagagaagactccagaaagtggaagaggcgcatttgcagacaggcccacatcccctattcagataatgacggtgtctacatcagcagcaccagctgagattgcagtttctcccgaatcccaggaaatgcccatgggacggacaatcctcaaagtcaccccagaaaaacagactgttccaactccagtacggaaatacaactccaatgccaatatcataaccacagaggacaataaaattcacattcacttagggtctcagtttaaacggtcccctgggacttcaggtgaaggagtcagtccagttattactgtccgaccagtaaacgtgacagccgaaaaggaggtttccaccggcactgtccttcgctctcccaggaatcacctctcctcacggcctggtgcaagcaaagtgacgagcactatcaccataacaccggtcacaacgtcatctgctcgaggaacccagtcagtgtcaggacaagacgggtcatcccagcggcctacacccacccgcattcctatgtcaaaaggtatgaaagcaggaaagccagtagtggcagccccaggagcaggaaatctgaccaaattcgagcctcgagctgagactcagtctatgaaaatagagctgaagaaatctgcagccagcagcaccacctctctcggaggggggaagggctgagggcagtggctaagggggtatgttgtgcagatgctactgctgccgtgaaagtgaaccttcatctgtttgtgccagttctttacatgtactaatttaagttttaaatattgtgtttataaaataaccaactaataaccatttgtctttcccattttgtgcacttgttttgatgctggggaacaaaattagcaaaactattgcttgctgcctagaagccagggcgtggtttctagttccagttttgcttctagcaagtggacccatcaatagacccatctgagcctgtttcctcatcagttagatgtggggactcaatcacacgctcttcaagtccggctcccatatttcctaattgcaagccaaatttaatgtaccttgttccacaataattttttattaaaaaaatcctattacaaaataagacatactttaactattgtcatttgcctctttcacatcatgaatttgctttatgtgctggaaaaaacatcacatagctatcacagggcctggacctctaaaattttgcaaaaacaaaaggttctaagatgatttcaggaaataatgtgaacatgtaataaaatggaatgaaatatggaatcctaagaacagagttttacttatttgtgtgtgtctgtgtgtattgtagaagttttagctcctccataagattcccaaa

SEQ ID NO: 181 - DNA, 3324 bp, Homo sapiens
  misc_feature: Incyte ID No: 460745.7
cgcgatctagaagatatgttcagcttggatatgatcatcagtgacccagctgcagaagccagcagggctgggaagaagcagctcagaggtgttcagaacccttgcccatctgccagagccagaccccggcacaagtccctcaacataaaggacaagatatcagaatgggaagggaagaaagaggtgcccactcctgcacccagcaggagagcagacggacaggaggattatctgccgtcctctacggtggagaggaggagtagtgatggggtgagaactcaggtcacagaggctaagaatggaatgaggccaggaacagagagcacagagaaggagaggaataaaggagcagtgaacgtcgggggacaggacccagagccggggcaagacctaagccagccagaacgggaagtggatcctagctggggccgaggccgagagccaagacttggcaagctacgctttcagaacgatcacctctccgtgctgaagcaggtcaagaaactcgagcaggctttgaaggatgggtcggcagggctggatccccagttaccagggacttgttactccccacactgccctcctgacaaggcagaggcagggtccacccttcctgagaacctgggaggcgggagtggctcagaagtcagccagagggtccacccctcggacctggaaggcagggagcccacccctgagcttgtggaggacaggaaaggttcatgcagaaggccctgggaccggagccttgagaacgtgtataggggctcggagggttcccccacaaagcccttcatcaaccctctgccaaaaccccggagaacgttcaaacatgccggagaaggggacaaagatgggaagcctggcatcggcttcaggaaagagaaaagaaatctgcctcctctgccctctctacctcccccgcctctgccctcctctcccccaccttcctctgtgaacagaagactgtggaccgggagacagaaatccagtgcagaccacagaaagtcctatgagtttgaagatttactgcagtcttcctctgagagcagcagggtggactggtacgcgcagactaagctggggctgacacgcactttatcggaggagaacgtctatgaagacattctagatccgccaatgaaggagaacccttatgaggacatcgagttacatggtcgctgcctgggaaagaagtgtgtcttgaattttcctgcttctcccacctcttccatccctgacacactcaccaagcagtcattgtccaaacctgcttttttccgacaaaattcagagaggaggaacttcaagctgctggacactaggaagctgagtcgggatggaactgggtccccttccaaaatcagccctccctccactcccagcagccctgatgacattttctttaaccttggagacccacagaacggcaggaagaagagaaagatacccaagctggtgttgcgaatcaacgccatttatgaggtccggagaggaaagaaacgggtgaagaggctgtcccagtcaatggagagcaactcaggaaaagtgacagatgagaacagtgagtctgacagtgacacagaggagaagctgaaagctcacagccagcgcctggtcaacgtgaagtcccggctgaagcaggcgcctcggtacccatcacttgcccgggaactcatcgagtaccaggagaggcagctcttcgagtactttgtggttgtgtctttgcacaagaagcaggccggggctgcctacgtgccagaactcacccaacagttccctctgaagttggaaaggtctttcaagttcatgagagaagctgaggaccaactgaaggccattccccagttctgttttcccgatgccaaggattgggttcctgtccagcagttcaccagtgaaacattctcgtttgtcttaactggagaagatgggagcagaaggttcggttactgccgaagactgctgcctggaggcaaagggaagcgccttcctgaagtttactgcattgtgagccgcctgggatgcttcagcctcttttcaaggatcttggatgaggtggaaaaaagacgaggcatctctcctgccctggttcagccactcatgagaagtgtcatggaagcccctttcccagccctgggcaaaaccatccttgtcaagaacttcctgccaggttcaggaactgaggtgatcgaactgtgccgcccgctggactcccggctcgagcacgtggactttgagtctctcttctcctccctcagcgtccgccacctggtctgtgtgtttgcctccctgcttctggagaggagggtcatcttcattgcagacaagctcagcatcctgtccaagtgctgccacgcgatggtggcgctgatctaccccttcgcctggcagcacacctacatcccggtgctgccacccgccatggtcgacatcgtgtgctcgccgacgcccttcctcatcgggctgctctccagctcgctgccactgctcagggagctgccgctggaagaggtccttgtggttgacctcgtcaacagccggttcctcagacagatggacgatgaggactccatcctgccccggaagcttcaggtggccctggaacacattctggaacagaggaacgagctggcttgtgagcaggacgaagggcccctagacggcaggcacggtccagagtccagccccttgaacgaggtggtgtctgaagcctttgtccgcttcttcgtggagattgtgggacactactctttgttcctgacgtcgggcgagcgtgaggagagaaccctgcagcgggaggccttccgcaaagctgtctcctccaagagcctccgccacttcctggaggtcttcatggagactcagatgtttcggggcttcatccaggagcgggagctgcgccggcaggatgccaaaggtctgtttgaggtccgagcccaagagtatctggaaacactccccagtggagagcacagcggtgtcaataagttcctgaagggactaggcaataaaatgaaatttctccacaagaaataactctcagcctcaagggaaaacttcctcctagtgcagccctattctttaaaaacagttcctggtggcctttctgaaaggctgggtcccaggttgtcacggtgcggaactggaggccgcggtggcttctggccgaggctgggctcttccctggatgaggacctgggagccgcctgggaggacagccccagaaagggagcccgagaccaggcgtgtcgccgacatgcaaatgggttgttttggtggttgggtttttttttatcttagatattaaaagtaagaaaaatg

SEQ ID NO: 182 - DNA, 2478 bp, Homo sapiens
  misc_feature: Incyte ID No: 399300.18
cgggcgggtgggctgactggcggcaggctcgccgcggcgcggagtcccggctgcgggatagaccgagggccatggccgcctctcccggacccgccggcgttggcggcgccggagcagtctacggctccggctcttcgggcttcgccctcgactcgggactggagatcaaaactcgctcggtggagcagacgctactcccgctggtttctcagatcaccacgcttattaatcataaagataataccaaaaagtctgataaaactctgcaagcaattcagcgtgtaggacaagctgtcaacttggcagttggaagatttgttaaagtaggagaagctatagccaatgaaaactgggatttgaaagaagaaataaatattgcttgtattgaagctaaacaagcaggagaaacaattgcagcacttacagacataaccaacttgaaccatctggaatctgatgggcagatcacaatttttacagacaaaacaggagtgataaaggctgcaagattacttctttcttcagtgacaaaagtgttgttgctggcagaccgagtagtcattaaacagataataacatcaagaaataaggttctcgcaactatggaaagactagagaaagtgaatagctttcaagagtttgtccaaatattcagtcaatttggaaatgaaatggtggagtttgcacatctgagtggagatagacaaaatgatttgaaagatgaaaagaaaaaggcaaaaatggcagcagctagggcagttcttgaaaagtgtacaatgatgcttctcacagcttcaaagacatgtctgaggcatcctaactgcgaatcagcccataaaaacaaagaaggagtatttgaccgtatgaaagtggcattggataaggtcattgaaattgtgactgactgtaaaccgaatggagagactgacatttcatctatcagtatttttactggaattaaggaattcaagatgaatattgaagctcttcgggagaatctttattttcagtccaaagagaacctttctgtgacattggaagtcatcttggagcgtatggaggactttactgattctgcctacaccagccatgagcacagagaacgcatcttggaactgtcaactcaggcgagaatggaactgcagcagttaatttctgtgtggattcaagctcaaagcaagaaaacaaaaagcatcgctgaagaactggaactcagtattttgaaaatcagtcacagtcttaatgaacttaagaaagaacttcatagtacagcgacacagctggcagcagatctattaaaataccatgctgatcatgtggttctaaaagcattaaaacttactggagtagaaggaaatttagaagctttggctgaatatgcctgtaaactctctgaacagaaagagcagcttgttgagacctgtcgattgttacgacacatatctgggacagaacctctggaaataacctgtatacatgcagaggagacatttcaggtgactggccaacagataatttctgctgctgaaacattgacattgcatccatctagtaaaattgctaaagaaaacctagatgtattttgtgaagcttgggaatcccaaattagtgacatgtcaacactgctgagagaaatcaatgacgtgtttgaaggaagacgaggagagaagtatggctacctttcacttccaaagccaatgaagaataatgcaaacctgaaatcattaaagccagacaagcctgactctgaggagcaagccaagatagcaaagcttggacttaagctgggtttgctcacctctgacgctgactgcgaaattgagaagtgggaagatcaggagaatgagattgttcaatatggacggaacatgtccagtatggcctattctctgtatttatttactagaggagaggggccactgaaaacttcccaggatttaattcatcaactagaggtttttgctgcagagggtttaaagcttacttccagtgttcaagctttttcaaaacagctgaaagacgatgacaagcttatgcttctcctggaaataaacaagctaattcctctatgccaccagctccagacagtaactaagacttctttgcagaataaagtatttctaaaggttgacaagtgtattacgaagacaagatccatgatggctctcttagtccaacttctttcactttgttataaactgctgaagaagcttcagatggaaaataacggatgggtctcagttacaaataaggacactatggatagtaaaacttgagaagcttttggggtcagatctctggaacatcatgtgatgaagctgacatttttaaaaatcaaatgatcctttatcttttcagaaattcatcaattttataaagaaaacaatattgaaattttgctctattttctgatcatgaaactgattgtaaagctttttgacaactaataaatgtcttggtaattgctagattctaaaa

SEQ ID NO: 183 - DNA, 1726 bp, Homo sapiens
  misc_feature: Incyte ID No: 248091.1
ggccagtatgtttttcatatccagtcattccttttttcctggctgacatcctcacttcctgcctgtggaggaaaagttaaatattaaatttgaactcaattgaatgtggacacaaacaatggtcaccaagtccgggaacaggttgtgtgagtcccttgaggcatttatcctgccctgtttcggagaaatctctatttcaaactattcctatgtgttacttactgaaaaacaacagacaatcgcaaaaacaagttgacctttttgtgttccttgagcccagtcacaaagggccctcatgactgggcctcatgccaaacaacttgttacaaaaagagctagggtcccagaccgcaccaaagacccatgagacctctcctcgtctgtgcacagactggtggccgactctggagcccaggctgttgcttcctggtctggtgatgaatcctccatagtctggaacagccagctgaaaactctcctggccattggaggctggaacttcgggactgcccctttcactgccatggtttctactcctgagaaccgccagactttcatcacctcagtcatcagattcctgcgccagtatgagtttgacgggctggactttgactgggagtaccctggctctcgtgggagccctcctcaggacaagcatctcttcactgtcctggtgcaggaaatgcgtgaagcttttgagcaggaggccaagcagatcaacaagcccaggctgatggtcactgctgcagtagctgctggcatctccaatatccagtctggctatgagatcccccaactgtcacagtacctggactacatccatgtcatgacctacgacctccatggctcctgggagggctacactggagagaacagccccctctacaaatacccgactgacaccggcagcaacgcctacctcaatgtggattatgtcatgaactactggaaggacaatggagcaccagctgagaagctcatcgttggattccctacctatggacacaacttcatcctgagcaacccctccaacactggaattggtgcccccacctctggtgctggtcctgctgggccctatgccaaggagtctgggatctgggcttactacgagatctgtaccttcctgaaaaatggagccactcagggatgggatgcccctcaggaagtgccttatgcctatcagggcaatgtgtgggttggctatgacaacgtcaagagcttcgatattaaggctcaatggcttaagcacaacaaatctggaggcgccatggtctgggccattgatctggatgacttcactggcactttctgcaaccagggcaagtttcccctaatctccaccctgaagaaggccctcggcctgcagagtgcaagttgcacggctccagctcagcccattgagccaataactgctgctcccagtggcagcgggaacgggagcgggagtagcagctctggaggcagctcgggaggcagtggattctgtgctggcagagccaacggcctctaccccgtggcaaataacagaaatgccttctggcactgcgtgaatggagtcacgtaccagcagaactgccaggccgggcttgtcttcgacaccagctgtgattgctgcaactgggcataaacctgacctggtctatattccctagagttccagtctcttttgcttaggacatgttgcccctacctaaagtcctgcaataaaatcagcagtcaaaac

SEQ ID NO: 184 - DNA, 2978 bp, Homo sapiens
  misc_feature: Incyte ID No: 4030737CB1
cagcctgctcccgcccgagcgcgcactcacggccgctctccctcctcgctccgcagccgcggcccatggagcccgccggcccggcccccggccgcctcgggccgctgctctgcctgctgctcgccgcgtcctgcgcctggtcaggagtggcgggtgaggaggagctgcaggtgattcagcctgacaagtccgtatcagttgcagctggagagtcggccattctgcactgcactgtgacctccctgatccctgtggggcccatccagtggttcagaggagctggaccaggccgggaattaatctacaatcaaaaagaaggccacttcccccgggtaacaactgtttcagacctcacaaagagaaacaacatggacttttccatccgcatcggtaacatcaccccagcagatgccggcacctactactgtgtgaagttccggaaagggagccccgatgacgtggagtttaagtctggagcaggcactgagctgtctgtgcgcgccaaaccctctgcccccgtggtatcgggccctgcggcgagggccacacctcagcacacagtgagcttcacctgcgagtcccacggcttctcacccagagacatcaccctgaaatggttcaaaaatgggaatgagctctcagacttccagaccaacgtggaccccgtaggagagagcgtgtcctacagcatccacagcacagccaaggtggtgctgacccgcgaggacgttcactctcaagtcatctgcgaggtggcccacgtcaccttgcagggggaccctcttcgtgggactgccaacttgtctgagaccatccgagttccacccaccttggaggttactcaacagcccgtgagggcagagaaccaggtgaatgtcacctgccaggtgaggaagttctacccccagagactacagctgacctggttggagaatggaaacgtgtcccggacagaaacggcctcaaccgttacagagaacaaggatggtacctacaactggatgagctggctcctggtgaatgtatctgcccacagggatgatgtgaagctcacctgccaggtggagcatgacgggcagccagcggtcagcaaaagccatgacctgaaggtctcagcccacccgaaggagcagggctcaaataccgccgctgagaacactggatctaatgaacggaacatctatattgtggtgggtgtggtgtgcaccttgctggtggccctactgatggcggccctctacctcgtccgaatcagacagaagaaagcccagggctccacttcttctacaaggttgcatgagcccgagaagaatgccagagaaataacacaggacacaaatgatatcacatatgcagacctgaacctgcccaaggggaagaagcctgctccccaggctgcggagcccaacaaccacacggagtatgccagcattcagaccagcccgcagcccgcgtcggaggacaccctcacctatgctgacctggacatggtccacctcaaccggacccccaagcagccggcccccaagcctgagccgtccttctcagagtacgccagcgtccaggtcccgaggaagtgaatgggaccgtggtttgctctagcacccatctctacgcgctttcttgtcccacagggagccgccgtgatgagcacagccaacccagttcccggagggctggggcggtgcaggctctgggacccaggggccagggtggctcttctctccccacccctccttggctctccagcacttcctgggcagccacggccccctccccccacattgccacatacctggaggctgacgttgccaaaccagccagggaaccaacctgggaagtggccagaacttcctggggtccaagaactcttgtgcctccgtccatcaccatgtgggttttgaagaccctcgactgcctccccgatgctccgaagcctgatcttccagggtggggaggagaaaatcccacctcccctgacctccaccacctccaccaccaccaccaccaccaccaccaccactaccaccaccacccaactggggctagagtggggaagatttcccctttagatcaaactgccccttccatggaaaagctggaaaaaaactctggaacccatatccaggcttggtgaggttgctgccaacagtcctggcctcccccatccctaggctaaagagccatgagtcctggaggaggagaggacccctcccaaaggactggagacaaaaccctctgcttccttgggtccctccaagactccctggggcccaactgtgttgctccacccggacccatctctcccttctagacctgagcttgcccctccagctagcactaagcaacatctcgctgtggacgcctgtaaattactgagaaatgtgaaacgtgcaatcttgaaactgaggtgttagaaaacttgatctgtggtgttttgttttgttttttttcttaaaacaacagcaacgtgatcttggctgtctgtcatgtgttgaagtccatggttgggtcttgtgaagtctgaggtttaacagtttgttgtcctggagggattttcttacagcgaagacttgagttcctccaagtcccagaaccccaagaatgggcaagaaggatcaggtcagccactccctggagacacagccttctggctgggactgacttggccatgttctcagctgagccacgcggctggtagtgcagccttctgtgaccccgctgtggtaagtccagcctgcccagggctgctgagggctgcctcttgacagtgcagtcttatcgagacccaacgcctcagtctgctcatccgtaaagtggggatagtgaagatgacacccctccccaccacctctcataagcactttaggaacacacagagggtagggatagtggccctggccgtctatcctacccctttagtgaccgcccccatcccggctttctgagctgatccttgaagaagaaatcttccattt

SEQ ID NO: 185 - DNA, 2267 bp, Homo sapiens
  misc_feature: Incyte ID No: 3012575CB1
cagagaccctctgccaccagagaccgtcctcacccctgtcctcactgctccctgaagccagcctcctccgtgcgcccgccagcctcgcccgcgccgtcaccatgagccaggcctactcgtccagccagcgcgtgtcctcctaccgccgcaccttcggcggggccccgggcttcccgctcggctccccgctgagctcgcccgtgttcccgcgggcgggtttcggctctaagggctcctccagctcggtgacgtcccgcgtgtaccaggtgtcgcgcacgtcgggcggggccgggggcctggggtcgctgcgggccagccggctggggaccacccgcacgccctcctcctacggcgcaggcgagctgctggacttctcactggccgacgcggtgaaccaggagtttctgaccacgcgcaccaacgagaaggtggagctgcaggagctcaatgaccgcttcgccaactacatcgagaaggtgcgcttcctggagcagcagaacgcggcgctcgccgccgaagtgaaccggctcaagggccgcgagccgacgcgagtggccgagctctacgaggaggagctgcgggagctgcggcgccaggtggaggtgctcactaaccagcgcgcgcgcgtcgacgtcgagcgcgacaacctgctcgacgacctgcagcggctcaaggccaagctgcaggaggagattcagttgaaggaagaagcagagaacaatttggctgccttccgagcggacgtggatgcagctactctagctcgcattgacctggagcgcagaattgaatctctcaacgaggagatcgcgttccttaagaaagtgcatgaagaggagatccgtgagttgcaggctcagcttcaggaacagcaggtccaggtggagatggacatgtctaagccagacctcactgccgccctcagggatatccgggctcagtatgagaccatcgcggctaagaacatttctgaagctgaggagtggtacaagtcgaaggtgtcagacctgacccaggcagccaacaagaacaacgacgccctgcgccaggccaagcaggagatgatggaataccgacaccagatccagtcctacacctgcgagattgacgccctgaagggcactaacgattccctgatgaggcagatgcgggaattggaggaccgatttgccagtgaggccagtggctaccaggacaacattgcgcgcctggaggaggaaatccggcacctcaaggatgagatggcccgccatctgcgcgagtaccaggacctgctcaacgtgaagatggccctggatgtggagattgccacctaccggaagctgctggagggagaggagagccggatcaatctccccatccagacctactctgccctcaacttccgagaaaccagccctgagcaaaggggttctgaggtccataccaagaagacggtgatgatcaagaccatcgagacacgggatggggaggtcgtcagtgaggccacacagcagcagcatgaagtgctctaaagacagagaccctctgccaccagagaccgtcctcacccctgtcctcactgctccctgaagccagccttcttccatcccaggacaccacacccagcctcagtcctcccctcacagcctctgacccctcctcactggccatccctcgtggtccccaacagcgacatagcccatccctgcctggtcacagggcatgccccggccacctctgcggaccccagctgtgagccttggctgttggcagtgagtgagcctggctcttgtgctggatggagcccaggcgggagcggtggccctgtccctcccacctctgtgacctcaggcactagcctttggctctggagacagccccagagcagggtgttgggatactgcagggccaggactgagccccgcagacctccccagcccctagcccaggagagagaaagccaggcaggtagccagggggactagcccctgtggagactggggggcttgaaattgtccccgtggtctcttactttcctttccccagcccagggtggacttagaaagcaggggctacaagagggaatccccgaaggtgctggaggtgggagcaggagattgagaaggagagaaagtgggtgagatgctggagaagagaggagaggagagaggcagagagcggtctcaggctggtgggaggggcgcccacctccccacgccctcccctcccctgctgcaggggctctggagagaaacaataaagagattcacacacaaaaaaaaaaa

SEQ ID NO: 186 - DNA, 861 bp, Homo sapiens
  misc_feature: Incyte ID No: 221827.1
gaaaaaaagacaaaaagaaaaaagaaaaatctcattatttcaaaatgatagacatataccaaaaacaagtctataatgtgagtagttactaaaatttacacatcttaaaagtgtgtaaatgcttaaatttcagaattaccatcagaacctcaattgacattcctttgaataggctaataagtgacaaataagattaataagatttttcaaaatcgccaggactggtgaatataaatgatgattgaactggaataatattggggaccaaatcaaatgaatgattaaattatgaagctcatatccttttgaaggtagttgcaaagagacatttcaaaactgccctaggccattgcagcatccttagatgggacgcataatcattaccttaaagcatcaccactcattttgaccatatagattttattatgttagtttaaaaggtcaatcagcctcatgactttatagttatgtcttgtatttaaaaacattttttatacatttggttatgttgataaaccaaaaacatttgattaataaaatatctatttgaataaattatgagctatcctttcaaacagctattggcaagttttaaacccaaaatatatacacatagttctgtaataaaactgtttgacttctcaagtaacatgacttccttatttctgaacgtactggttactttcaaaatgaatttttattgagattttccattaactatttttttcaaagactcaaattttgtaccaagtaaatccaggctttatgtacaaacatgttgtttgttttatttggggctgggggaggtatatgatgagcagacttctcggaattcataataaattttctaaaagcctaaaa

SEQ ID NO: 187 - DNA, 5943 bp, Homo sapiens
  misc_feature: Incyte ID No: 238660.5
agccattgtcctggatgacgtgcgctgctcaggaatgagtctacttgtggagctgccccacaatggctggctctcccataactgtggccatagtgaagacgctggtgtcatctgctcaggacctgaatccagtttggccctgaggctggtgaatggaggtgacaggtgtcagggccgagtggaggtcctataccgaggctcttggggcaccgtgtgtgatgatcgagctgggacaccaatgatgccaatgtggtctgcaggcagctgggctgtggctgggccaggtctagaccccaggaaatgcccggtttggtcagggttcaggacccattgtcctggatgatgtgcgctgctcagggagatgagtcctacctgtggcagctgccccaacaatggctggctctcccacaactgtggccatcatgaagatgctggtgtcatctgctcagtttcccagtcccggccgacacccagtccagatacttggccgacctcacatgcatcaacagcaggatctgaatccagtttggccctgaggctggtgaatggaggtgacaggtgtcagggccgagtggaggtcctataccgaggctcctggggcaccgtgtgtgatgacagctgggacaccaatgatgccaatgtggtctgcaggcagctgggctgtggctgggccatgttggccccaggaaatgcccggtttggtcagggctcaggacccattgtcctggatgacgtgcgctgctcaggctatgagtcctacctgtggagctgcccccacaatggctggctctcccataactgtcagcacagtgaagacgctggtgtcatctgctcagctgcccactcccggtcgacgcccagtccagacacattggccgaccatcaccattgccatgcactcgacacgtaggatgctgaatcgcagatttgcaccctgaggctggtgaatgcgaggtgatcatggtgttcaggcctcgagtggaggttcctactaccagaggctgcctggggcaccgtgtgcgatgacagctgggacaccaatgatgccaatgtcgtctgcaggcaatctgggctgtggcatgggccatgtcagccccaggaaatgcccggtttggccagggttcaggacccattgtcctggatgacgtgcgctgctcaaggctatgagtcctacctgtggagctgcccccacaatggctggctctcccataactgtcagcacagtgaagacgctggtgtcatctgctcagctgcccactcgttggtcgacgcccagtccagacacattgccgaccatcaccttgcctgcatcgacagtaggatctgaatccagtttggccctgaggctggtgaatggaggtgacaggtgtcagggccgagtggaggtcctataccaaggctcctggggcaccgtgtgcgatgacagctgggacaccaatgatgccaatgtcgtctgcaggcaactgggctgtggctgggccatgtcagccccaggaaatgcccggtttggtcagggctcaggacccattgtcctggatgatgtgcgctgctcaggacacgagtcttacctgtggagctgcccccacaatggctggctctcccacaactgtggccatagtgaagacgctggtgtcatctgctcagcttcccagtcccggccaacacctagtccagacacttggccaacctcacatgcatcaacagcaggatctgaatccagtttggccctgaggctggtgaatggaggtgacaggtgtcagggccgagtggaggtcctataccgaggctcctggggcaccgtgtgtgatgactactgggacaccaatgatgccaatgtggtttgcaggcagctgggctgtggctgggccatgtcagccccaggaaatgcccggtttggccagggttcaggacccattgtcctggatgatgtgcgctgctcaggacatgagtcctatctgtggagttgcccccacgatggctggctctcccacaactgtggccatcatgaagacgctggtgtcatctgctcagcttcccagtcccagccgacacccagcccagacacttggccaacctcacatgcatcaacagcaggatctgaatccagtttggccctgaggctggtgaatggaggtgacaggtgtcagggccgagtggaggtcctataccgaggcccctggggcaccgtgtgtgatgactactgggacaccaatgatgccaatgtggtttgcaggcagctgggctgtggctgggccacgtcagccccaggaaatgcccggtttggccagggttcaggacccattgtcctggatgatgtgcgctgctcaggacatgagtcctatctgtggagctgcccccacaatggctggctctcccacaactgtggccatcatgaagacgctggtgtcatctgctcagcttcccagtcccagccgacacccagcccagacacttggccaacctcgcatgcatcaacagcaggatctgaatccagtttggccctgaggctggtgaatggaggtgacaggtgtcagggccgagtggaggtcctataccgaggctcctggggcaccgtgtgtgatgactactgggacaccaatgatgccaatgtggtttgcaggcagctgggctgtggctgggccacgtcagccccaggaagtgcccggtttggccagggttcaggacccattgccctggatgatgtgcgctgctcaggacatgagtcctatctgtggagctgcccccacaatggctggctctcccacaactgtggccatcatgaagacgctggtgtcatctgctcagcttcccagtcccagccgacacccagcccagacacttggccaacctctcgtgcatcaacagcaggatctgaatccactttggccctgagactggtgaatggaggtgacaggtgtcgaggccgagtggaggtcctataccaaggctcctggggcaccgtgtgtgatgactactgggacaccaatgatgccaacgtggtctgcaggcagctgggctgtggctgggccatgtcagccccaggaaatgcccagtttggccagggctcaggacccattgtcctggatgatgtgcgctgctcaggacacgagtcttacctgtggagctgcccccacaatggctggctctcccacaactgtggccatcatgaagatgctggtgtcatctgctcagctgctcagtcccagtcaacgcccaggccagatacttggctgaccaccaacttaccggcattgacagtaggatctgaatccagtttggctctgaggctggtgaatggaggtgacaggtgtcgaggccgagtggaggtcctgtatcgaggctcctggggaaccgtgtgtgatgacagctgggacaccaatgatgccaatgtggtctgcaggcagctgggctgtggctgggccatgtcggccccaggaaatgcccggtttggccagggctcaggacccattgtcctggatgatgtgcgctgctcagggaatgagtcctacctgtggagctgcccccacaaaggctggctcacccacaactgtggccatcacgaagacgctggtgtcatctgctcagccacccaaataaattctactacgacagattggtggcatccaacaactacaaccactgcaagaccctcttcaaattgtggtggcttcttattctatgccagtgggacattctccagcccatcctaccctgcatactaccccaacaatgctaagtgtgtttgggaaatagaagtgaattctggttatcgcataaacctgggcttcagtaatctgaaattggaggcacaccataactgcagttttgattatgttgaaatctttgatggatcattgaatagcagtctcctgctggggaaaatctgtaatgataccaggcaaatatttacatcttcttacaaccgaatgaccattcactttcgaagtgacatcagtttccaaaacactggctttttggcttggtataactccttcccaagcgatgccaccttgaggttggtcaatttaaattcatcctatggtctatgtgccgggcgtgtagaaatttaccatggtggcacctgggggacagtttgtgatgactcctggaccattcaggaagctgaggtggtctgcagacagctagggtgtggacgtgcagtttcagcccttggaaatgcatattttggctctggctctggccccatcaccctggacgatgtagagtgctcagggacggaatccactctctggcagtgccggaaccgaggctggttctcccacaactgtaatcatcgtgaagatgctggtgtcatctgctcaggaaaccatctatcgacacctgctccttttctcaacatcacccgtccaaacacagattattcctgcggaggcttcctatcccaaccatcaggggacttttccagcccattctatcccgggaactatccaaacaatgccaagtgtgtgtgggacattgaggtgcaaaacaactaccgtgtgactgtgatcttcagagatgtccagcttgaaggtggctgcaactatgattatattgaagttttcgatggcccctaccgcagttcccctctcattgctcgagtttgtgatggggccagaggctccttcacttcttcctccaacttcatgtccattcgcttcatcagtgaccacagcatcacaaggagagggttccgggctgagtactactccagtccctccaatgacagcaccaacctgctctgtctgccaaatcacatgcaagccagtgtgagcaggagctatctccaatccttgggcttttctgccagtgaccttgtcatttccacctggaatggatactacgagtgtcggccccagataacgccgaacctggtgatattcacaattccctactcaggctgcggcaccttcaagcaggcagacaatgacaccatcgactattccaacttcctcacagcagctgtctcaggtggcatcatcaagaggaggacagacctccgtattcacgtcagctgcagaatgcttcagaacacctgggtcgacaccatgtacattgctaatgacaccatccacgttgctaataacaccatccaggtcgaggaagtccagtatggcaattttgacgtgaacatttccttttatacttcctcatctttcttgtatcctgtgaccagccgcccttactacgtggacctgaaccaggacttgtacgttcaggctgaaatcctccattctgatgctgtactgaccttgtttgtggacacctgcgtggcatcaccatactccaatgacttcacgtctttgacttatgatctaatccggagtggatgcgtgagggatgacacctacggaccctactcctcgccatctcttcgcattgcccgcttccggttcagggccttccacttcctgaaccgcttcccctccgtgtacctgcgttgtaaaatggtggtgtgcagagcgtatgacccctcttcccgctgctaccgaggctgtgtgttgaggtcgaagagggatgtgggctcctaccaggaaaaggtggacgtcgtcctgggtcccatccagctgcagacccccccacgccgagaagaggagcctcggtaggtggtcgctctcagaccccactgtccaccggggcgcagacccctgactcggggacttgggatgttcctcttggtgtcatattccaactcagattgagccctacattgtgctgcacctggtcatacggagttgaatcagacctggttcccgcctcccccaaggctcatggtccttggaggacccgttgcagggtgaggtcaagagagttctgacctggatggcccatagacctgacgtcccagaatccatgcttctcatctgcaaaatgaaaatgtcaatacttacttcttagcactgttgagagggttacttacataaaggaattttggtgaaactg

SEQ ID NO: 188 - DNA, 1792 bp, Homo sapiens
  misc_feature: Incyte ID No: 2171401CB1
cgccgctggggccggcccgcacggcttcatctgagggcgcacggcccgcgaccgagcgtgcggactggcctcccaagcgtggggcgacaagctgccggagctgcaatgggccgcggctggggattcttgtttggcctcctgggcgccgtgtggctgctcagctcgggccacggagaggagcagcccccggagacagcggcacagaggtgcttctgccaggttagtggttacttggatgattgtacctgtgatgttgaaaccattgatagatttaataactacaggcttttcccaagactacaaaaacttcttgaaagtgactactttaggtattacaaggtaaacctgaagaggccgtgtcctttctggaatgacatcagccagtgtggaagaagggactgtgctgtcaaaccatgtcaatctgatgaagttcctgatggaattaaatctgcgagctacaagtattctgaagaagccaataatctcattgaagaatgtgaacaagctgaacgacttggagcagtggatgaatctctgagtgaggaaacacagaaggctgttcttcagtggaccaagcatgatgattcttcagataacttctgtgaagctgatgacattcagtcccctgaagctgaatatgtagatttgcttcttaatcctgagcgctacactggttacaagggaccagatgcttggaaaatatggaatgtcatctacgaagaaaactgttttaagccacagacaattaaaagacctttaaatcctttggcttctggtcaagggacaagtgaagagaacactttttacagttggctagaaggtctctgtgtagaaaaaagagcattctacagacttatatctggcctacatgcaagcattaatgtgcatttgagtgcaagatatcttttacaagagacctggttagaaaagaaatggggacacaacattacagaatttcaacagcgatttgatggaattttgactgaaggagaaggtccaagaaggcttaagaacttgtattttctctacttaatagaactaagggctttatccaaagtgttaccattcttcgagcgcccagattttcaactctttactggaaataaaattcaggatgaggaaaacaaaatgttacttctggaaatacttcatgaaatcaagtcatttcctttgcattttgatgagaattcattttttgctggggataaaaaagaagcacacaaactaaaggaggactttcgactgcattttagaaatatttcaagaattatggattgtgttggttgttttaaatgtcgtctgtggggaaagcttcagactcagggtttgggcactgctctgaagatcttattttctgagaaattgatagcaaatatgccagaaagtggacctagttatgaattccatctaaccagacaagaaatagtatcattattcaacgcatttggaagaatttctacaagtgtgaaagaattagaaaacttcaggaacttgttacagaatattcattaaagaaaacaagctgatatgtgcctgtttctggacaatggaggcgaaagagtggaatttcattcaaaggcataatagcaatgacagtcttaagccaaacattttatataaagttgcttttgtaaaggagaattatattgttttaagtaaacacatttttaaaaattgtgttaagtctatgtataatactactgtgagtaaaagtaatactttaataatgtggtacaaattttaaagtttaatattgaataaaaggaggattatcaaattcaaaaaaaaaaaa

SEQ ID NO: 189 - DNA, 2617 bp, Homo sapiens
  misc_feature: Incyte ID No: 1420940CB1
tgctgctgctgctgctgccgccgccgccgccgccgtccctgcgtccttcggtctctgctcccgggacccgggctccgccgcagccagccagcatgtcggggatcaagaagcaaaagacggagaaccagcagaaatccaccaatgtagtctatcaggcccaccatgtgagcaggaataagagagggcaagtggttggaacaaggggtgggttccgaggatgtaccgtgtggctaacaggtctctctggtgctggaaaaacaacgataagttttgccctggaggagtaccttgtctcccatgccatcccttgttactccctggatggggacaatgtccgtcatggccttaacagaaatctcggatcctctcctggggacagagaggaaaatatccgccggattgctgaggtggctaagctgtttgctgatgctggtctggtctgcattaccagctttatttctccattcgcaaaggatcgtgagaatgcccgcaaaatacatgaatcagcagggctgccattctttgaaatatttgtagatgcacctctaaatatttgtgaaagcagagacgtaaaaggcctctataaaagggccagagctggggagattaaaggatttacaggtattgattctgattatgagaaacctgaaactcctgagcgtgtgcttaaaaccaatttgtccacagtgagtgactgtgtccaccaggtagtggaacttctgcaagagcagaacattgtaccctatactataatcaaagatatccacgaactctttgtgccggaaaacaaacttgaccacgtccgagctgaggctgaaactctcccttcattatcaattactaagctggatctccagtgggtccaggttttgagcgaaggctgggccactcccctcaaaggtttcatgcgggagaaagagtacttacaggttatgcactttgacaccctgctagatggcatggcccttcctgatggcgtgatcaacatgagcatccccattgtactgcccgtctctgcagaggataagacacggctggaagggtgcagcaagtttgtcctggcacatggtggacggagggtagctatcttacgagacgctgaattctatgaacacagaaaagaggaacgctgttcccgtgtttgggggacaacatgtacaaaacacccccatatcaaaatggtgatggaaagtggggactggctggttggtggagaccttcaggtgctggagaaaataagatggaatgatgggctggaccaataccgtctgacacctctggagctcaaacagaaatgtaaagaaatgaatgctgatgcggtgtttgcattccagttgcgcaatcctgtccacaatggccatgccctgttgatgcaggacactcgccgcaggctcctagagaggggctacaagcacccggtcctcctactacaccctctgggcggctggaccaaggatgacgatgtgcctctagactggcggatgaagcagcacgcggctgtgctcgaggaaggggtcctggatcccaagtcaaccattgttgccatctttccgtctcccatgttatatgctggccccacagaggtccagtggcactgcaggtcccggatgattgcgggtgccaatttctacattgtggggagggaccctgcaggaatgccccatcctgaaaccaagaaggatctgtatgaacccactcatgggggcaaggtcttgagcatggcccctggcctcacctctgtggaaatcattccattccgagtggctgcctacaacaaagccaaaaaagccatggacttctatgatccagcaaggcacaatgagtttgacttcatctcaggaactcgaatgaggaagctcgcccgggaaggagagaatcccccagatggcttcatggcccccaaagcatggaaggtcctgacagattattacaggtccctggagaagaactaagcctttggctccagagtttctttctgaagtgctctttgattaccttttctatttttatgattagatgctttgtattaaattgcttctcaatgatgcattttaatcttttataatgaagtaaaagttgtgtctataattaaaaaaaaatatatatatatacacacacacatatacatacaaagtcaaactgaagaccaaatcttagcaggtaaaagcaatattcttatacatttcataataaaattagctctatgtattttctactgcacctgagcaggcaggtcccagatttcttaaggctttgtttgaccatgtgtctagttacttgctgaaaagtgaatatattttccagcatgtcttgacaacctgtactcttccaatgtcatttatcagttgtaaaatatatcagattgtgtcctcttctgtacaattgacaaaaaaaaaaatttttttttctcactctaaaagaggtgtggctcacatcaagattcttcctgatattttacctcatgctgtacaaagccttaatgttgtaatcatatcctacgtgttgaagacctgactggagaaacaaaatgtggcataacgtgaattttatcttagggatctgtgcagcctatttctgtcacaaaggtaaattgtccaataagggagtcttaatgggc

SEQ ID NO: 190 - DNA, 2263 bp, Homo sapiens
  misc_feature: Incyte ID No: 1383160.14
tgtgcgtccggaagtgtctcgcagatagtaaataatctcggaaaggcgagaaagaagctgtctccatcttgtctgtatccgctgctcttgtgacgttgtggagatggggagcgtcctggggctgtgctccatggcgagctggataccatgtttgtgtggaagtgccccgtgtttgctatgccgatgctgtcctagtggaaacaactccactgtaactagattgatctatgcacttttcttgcttgttggagtatgtgtagcttgtgtaatgttgataccaggaatggaagaacaactgaataagattcctggattttgtgagaatgagaaaggtgttgtcccttgtaacattttggttggctataaagctgtatatcgtttgtgctttggtttggctatgttctatcttcttctctctttactaatgatcaaagtgaagagtagcagtgatcctagagctgcagtgcacaatggattttggttctttaaatttgctgcagcaattgcaattattattggggcattcttcattccagaaggaacttttacaactgtgtggttttatgtaggcatggcaggtgccttttgtttcatcctcatacaactagtcttacttattgattttgcacattcatggaatgaatcgtgggttgaaaaaatggaagaagggaactcgagatgttggtatgcagccttgttatcagctacagctctgaattatctgctgtctttagttgctatcgtcctgttctttgtctactacactcatccagccagttgttcagaaaacaaggcgttcatcagtgtcaacatgctcctctgcgttggtgcttctgtaatgtctatactgccaaaaatccaagaatcacaaccaagatctggtttgttacagtcttcagtaattacagtctacacaatgtatttgacatggtcagctatgaccaatgaaccagaaacaaattgcaacccaagtctactaagcataattggctacaatacaacaagcactgtcccaaaggaagggcagtcagtccagtggtggcatgctcaaggaattataggactaattctctttttgttgtgtgtattttattccagcatccgtacttcaaacaatagtcaggttaataaactgactctaacaagtgatgaatctacattaatagaagatggtggagctagaagtgatggatcactggaggatggggacgatgttcaccgagctgtagataatgaaagggatggtgtcacttacagttattccttctttcacttcatgcttttcctggcttcactttatatcatgatgacccttaccaactggtacaggtatgaaccctctcgtgagatgaaaagtcagtggacagctgtctgggtgaaaatctcttccagttggattggcatcgtgctgtatgtttggacactcgtggcaccacttgttcttacaaatcgtgattttgactgagtgagacttctagcatgaaagtcccactttgattattgcttatttgaaaacagtattcccaacttttgtaaagttgtgtatgtttttgcttcccatgtaacttctccagtgttctggcatgaattagattttactgcttgtcattttgttattttcttaccaagtgcattgatatgtgaagtagaatgaattgcagaggaaagttttatgaatatggtgatgagttagtaaaagtggccattattgggcttattctctgctctatagttgtgaaatgaagagtaaaaacaaatttgtttgactattttaaaattatattagaccttaagctgttttagcaagcattaaagcaaatgtatggctgccttttgaaatatttgatgtgttgcctggcaggatactgcaaagaacatggtttattttaaaatttataaacaagtcacttaaatgccagttgtctgaaaaatcttataaggttttacccttgatacggaatttacacaggtagggagtgtttagtggacaatagtgtaggttatggatggaggtgtcggtactaaattgaataacgagtaaataatcttactatgggtcagcagcatggcctctgcccaacaacagtgcaactgttttggttgttttaacactccatgcacagtcatgggttccagtggcaacatgttatggcacactcgtgcacaggcattcagcacacagggttttgcacacacaggcatcaatccatggggcttcagcacaggcaagtgtttgcaaagtcactttgcaaagttagtttag

SEQ ID NO: 191 - DNA, 5394 bp, Homo sapiens
  misc_feature: Incyte ID No: 233331.8
  unsure 4030-4067, 5360: a, t, c, g, or other
cctttaacatcacaaatgtcagagttagagaagccaaagagcaaatgtttgaggtcctaagcttgactgtgtcttagagacagctgtgggcttctccacgccctgggtccagatgctgataagtgggaatggatgctgtctcttccacactctgatatgaatgtcatgggtaacaactgtgagattccagatcgttgtatttattgatgtagcttttttcctttttgtgctctaaaacttgccaatctgttcttcattagactgtgagctcattaagagcaagggcacatttttctccactctgtaaaatctccatccataatgcttagtacagaacagtatttttggtacatactgagtagctaccaaaggatggtggttataagtacttaatattgttgtgtgtttatccaacagagaaaatgtaaagttagattgatttaaaagtaaatgaatgacagaaaacaggttttggggatcttccctcttgtccatctccaaagagaagccttctgcaatacccaggtacattttggcacattggaatcgcacatgctaaagagttctaatcctcattgttattctttagggtgccaaggactcacccgtacgtcgggctgtgaaagacaccctttccaacccacagtccccacagccatcaccttacaactcccccaaaccacaacacaaagtcacacagagcttcttgccacccggctgggaaatgaggatagcgccaaacggccggcccttcttcattgatcataacacaaagactacaacctgggaagatccacgtttgaaatttccagtacatatgcggtcaaagacatctttaaaccccaatgaccttgggcccccttcctcctggctgggaagaaagaattcacttggatggccgaacgttttatattgatcataatagcaaaattactcagtgggaagacccaagactgcagaacccagctattactggtccggctgtcccttactccagagaatttaagcagaaatatgactacttcaggaagaaattaaagaaacctgctgatatccccaataggtttgaaatgaaacttcacagaaataacatatttgaagagtcctatcggagaattatgtccgtgaaaagaccagatgtcctaaaagctagactgtggattgagtttgaatcagagaaaggtcttgactatgggggtgtggccagagaatggttcttcttactgtccaaagagatgttcaacccctactacggcctctttgagtactctgccacggacaactacacccttcagatcaaccctaattcaggcctctgtaatgaggatcatttgtcctacttcacttttattggaagagttgctggtctggccgtatttcatgggaagctcttagatggtttcttcattagaccattttacaagatgatgttgggaaagcagataaccctgaatgacatggaatctgtggatagtgaatattacaactctttgaaatggatcctggagaatgaccctactgagctggacctcatgttctgcatagacgaagaaaactttggacagacatatcaagtggatttgaagcccaatgggtcagaaataatggtcacaaatgaaaacaaaagggaatatatcgacttagtcatccagtggagatttgtgaacagggtccagaagcagatgaacgccttcttggagggattcacagaactacttcctattgatttgattaaaatttttgatgaaaatgagctggagttgctcatgtgcggcctcggtgatgtggatgtgaatgactggagacagcattctatttacaagaacggctactgcccaaaccaccccgtcattcagtggttctggaaggctgtgctactcatggacgccgaaaagcgtatccggttactgcagtttgtcacagggacatcgcgagtacctatgaatggatttgccgaactttatggttccaatggtcctcagctgtttacaatagagcaatggggcagtcctgagaaactgcccagagctcacacatgctttaatcgccttgacttacctccatatgaaacctttgaagatttacgagagaaacttctcatggccgtggaaaatgctcaaggatttgaaggggtggattaagcaccctgtgcctcgggggtggttgttcttcaagcaagttctgcttgcacttttgcatttgcctaacagacttttgcagaggcgatggcagagagcagctgcaggcatggtccctggagccgagccttcaccacgcactcgtccaagttcggatgcgggaacctggtcccagcttgagttcctgcctttcccaccacaaattatcaactggttgatgtgtacactaattacatttcaggaggacttaatgctatttatgttgtgcctctgcaggcaaagcccttaataaatattttacatcctttctaatgacaatgaatggaattaatcactcaacaggtatagtattacgactcatgtttactttttaaaatgatttagaccgattttcagattttatttcgttatgattaaagatgtctcatgtacttggaaaagtgagcattttttttttttgggttttccactttcataccaggcttaatgtcaatgacatttttatttttgaagtactctgacacctccaccctctactttattagaattggaaggcaaatttttgtccaaaaacctacagacaagtactttgagagaatttccaatataatattagacataatgataattttttccatactcagaatgaaaaactggatattacgtttttgttttggggtttttttgtacaaatttagctaatagctacaggctgagagaattgtaacatagcatgacaaattttgtgttgacttgaaaggaatcacaccattattccttagaagtaattacatgtgttctaacacatttgagacagggttggactcccatttctcatccgagaaattacttaacccttcctggcgctgtacagtcatcttttattctatttcctctttgctgtttgtagtagagacattttgaatgaaacttggcactgcttgattcaaaactgtggaaaccagatctgtttagtctcctgtttgtatgcgtttgctaatggtagctaaataaccagtttttgttgtaaatgcaccaattctgaaggcactttatgtactacatggaggtcatatctggttttgtttttatttttttatcatgaacattaaatgtgatgatgatttcttttccctgcacacatctttccggtgcaatatctatcaattgtgaatctggctgctggtgtataaaaacctggatgtaaagctgagcctacagacctgtcctcaccaactgttttgtgatttctactcaactacaaagatttatttaatgtactcttaatctaactgagttttgttaccaatgacctgttgcatgcttcaataccgtgtactgcctgagttgtgcctcttgtgtgctagattaaaagtgagacagagacttgacttgatcctctgagctcaagctattgagctggtagtggcagaggactgagggtacctgcacagtttgattcttttccacgtgtaagtctccattgcagaattgtcgtgctttgagaaaacacctgaggcagtgtgggagttgaacgaccctgctgtcctttttaacctgtgttgtcctagaccctgtcggggcagtcaggggacactagagatttgatctcatgcgagtcatcaataggacaaaaaagttgtggtttggggaggtctgtttgttacataaaaaggacctttcggtgtaagaaattgccgtttttaccctgccctggctggcatgtgagaagccatggaaggttgtggttgtaaatgagttgtctaaaggggtgcagaggcctgaggtttctaaaagaaggtagatttctacagagctgagtgttggttcctttttcttattggttgaaaattacctggtagtgatcagaaaacttagatgctatgtaactnnnnnnnnnnnnnnnnnnnnnnnnnnnnnnnnnnnnnnttcccgctcatgagttttgactattggtgagatgttttccgctacagttaacatgacaaatgtctcagtggcaaaaatcccctttttgtaagcccccatagtctagaggcagttttctttttaagaatcatgccagagcctgagtcgagcagtatgctttcttggtttttgagagtaattgtgtaattgtagagggagaaatccaattctaacctaagaactgggattcttctgtcatcttgtaaaccgtatattgaaaaaaacagaatgtcactaaatgcatattaagtcaagtattggaaagtataaaagaaaaatcattctgacaatttctaagccagaagcaaacaagaattactgaaatctaccccatgaatacttggaaggcagtaattgtgagtgacacctcagttcatcaaccccttaataatatcagcttaattttaatgacaactaaatatgctgaagtgaggatttagtattttttaaaaaagcaaaacaaggttcagtagtcctcagcaattctccaagtttctctctttgcctaaaatggtcatagatcttgatttctctgaatcgtgatgaccacacccagtcatcttcacagcataattgcaggtggcagtaaagagagtgtgctgggtaaggagcagttgctgggtcattccttgggccccgacctgcccggggagtagccctgggggagagagggcagtgttgcctatcccagaggtcccagcagtcacactgctctgcaggccgggctctctttatagccagagaaatcaccttaatgcagtctctttagttgtctgctgaagctgtagttattatgggccacttacatgaggctgagaagtacgtgccggagctcacacactgcctgttgcggttctcttaacatcagttatcacagctgcctgtgggtcccgggtatttccattcctgccccttgttggcccgaggaaggatgtggaaagagcacctggcgggatgaaggtccaacagcctgtgcctctccactgctggccctggagccggcagcagtgaggcattcattgtctgtgttgcggtgtattcccagcttcagtgctcttttcctttttgcctgaaatgtttatgcttctctgcagccagtcctctaacaaatctcaagaacaaaggtaagacacttggtttttgtttccaggacccttcagaaggtgacatcagatattccctaaattcagacaatgagggatacagagcgacttggcatgtattatttctcccatgtaaggacaaagggacagnttattattgttatttctgagacagatcttgctct

SEQ ID NO: 192 - DNA, 3733 bp, Homo sapiens
  misc_feature: Incyte ID No: 338217.10
acaaggagcgcatcttcatggagaacgtaggggccgtgaaggagctgtgcaagctgacagacaacctggagacgcgcattgatgagctggagcgctggagccacaagctggccaagctagcggcggctcgacagcctcaagtccaccggcagctcgggcgccttcagccatgcagggagccagttcagtcgggcgggcagcgtcccccacaagaagaggccccccaaggtggccagcaagtcatcgtccgtggttccggaccaggcctgcatcagccagcgcttcctgcagggaaccatcattgccctggtggtggtcatggccttcagcgtggtgtccatgtccacactgtacgtgctgagcctgcgcacagaggaggacctggtagacactgatgggtccagccagagctttgggaccacgcagctccgacagtcccccttgaccacggggctaccaggcatacagccctctttgctgctggtgaccaccagcctcaccagctcggccccaggttctgctgtccgcaccttggacatgtgttccagccacccctgccctgtcatctgctgttcctcacccactaccaaccctaccactggtcctagtcttggccccagctttaaccctggccatgttctcagcccaagtcccagccccagcaccaaccgctcaggccccagccagatggcccttctgccagtcaccaacatcagagccaagtcctggggtctttcagtcaatggcattggccactccaagcatcacaagagtctggagcctctggccagccctgcagtccccttccctggggggcagggcaaagccaagaacagtcccagccttggtttccatggccgggcccgccgaggggccctccagtccagcgtgggccctgctgagcccacctgggcccagggccagtcagagccagtgccctccctgacctccatccaggtgctggagaattcgatgtccatcacctcccagtactgtgctccaggggatgcctgcaggcctgggaacttcacctaccacatccctgtcagtagtggcaccccactgcacctcagcctgactctgcagatgaactcctcctcccccgtgtctgtggtgctgtgcagcctgaggtcaaaggaggaaccatgtgaggaggggagccttccacagagtctccacacccaccaggacacccagggcacctctcaccggtggccaataaccatcctgtccttccgtgaattcacctaccacttccgggtggcactgctgggtcaggccaactgcagttcagaggctctcgcccagccagccacagactaccacttccacttctaccgcctgtgtgactgagctgccctcctgaggcagcaccacaccagggaccaggggtgcccaggcaccccccaacactggatgcaatggtgttacactggagcccgctgcaggccagctctgctgttcactggccctacccgagactggtgaaactggaagtcttcacactggagttgctgttccagctggtcgcccctcacggcacagagggaacctgagagccagagacttcttgggccttcctgcctgccaccccctaggggccaggacaggaccagtttacctctttccagatatggtggttggagggctggttcaggtgccctggagggaaggggaagcctgtggccctgatttgttcagagcccattctcccttgcctccccttttgagactggagccaacccttttggagagaggacctgcccacctttgagatcagcagggggctcggatccagccctaagagacttgggtggacccccatgagtcaatggagggcagacggctctcccccttaaagctgttccctgggggatggcttggtagtggactttctggggtttgcctgttacgccagactcggacttctaagctttaagtgtggcccaggaggtttcttctccctgggagggcttggctcccaagaagtcccagggcagccgaggccagccctgcctgggttggagaaactgactttgtgccttaagtctactcagtgcctggtgaagccaccctcagcccttcacaggcctgaaccagtaggggccagtgggccaggtaagccctagagccttgaaccaggaatatccaggaagaggaaattccctttgagcccccagatggtattgcagcttcactgcctgcgttcctgggagcgtctggagctcacagtgatcagtgaccacatcattctctctgagcagaggagcaggaatccctcaagcagcagcctggtcttggctggtgggcagatgcaaatagcttttgctgttattaatgaagtaattactaaatgcacttaaaccagggcaggaaggaatggaaggatggagctagaaagctcagagtgggccagagcaggggtgtgacacttgcaaagacagggctctgactctgatccctcccagggagcctccgacacccatcccactcccaaccaccaagaccctgggttagggaagaagttgtatcttaagtgccaccttcaagtttcttagtggtgcctggtgcattccgaggctacatccaggctcatggaaggagtgtagtattcatttagccatgtctgccatgggtccagaaatgggaaagggaattgctgtccttgccctgtggtatgctgccacctctttgggaagcaggccttgcccctgtcccaccactcattctcagctttgaatgggaggcctttctatagtggaggcctttccttgaagcctatgaactgcaggcccccttttgccattgatctcaaagcacttgtcctcaggatagggaagagcagggggatgcaggaatagcagggatagcttgctcccagccccctccccaatttggttccgttgacataggaattttacgattcccaaaccatgcaggggctgagccttccttatgatgactttgttctccctcccactgggggaatcctccctatgccttaaaactgccgagccccactccatgtaataggattcctgggcttcctcaatgggggttcatgttcttggactgcgggccctcagtccttaactggaaagtgaccgtccactgccccatggagcccatctggacacagcacagccccaaaaccgttagcagctggctctgtttccaagcctggggaggggttcctcagtgcaggagttggggacaggctggggatccaagctgcttgagggggtcaaccttggaccaaagttgccttaagcctgtggtaaaagggcttcagggaaggtaagtgggccacctgctggaagctgccagctgcccggctggcaatggtgtgagtgtcttggccctgtccctgccctggggtccagcaggtcatccctcccttcttctctctcctttggcgtttgttcctgtagtcactgggctaatctccccctagcttcaagctgtacatagggcctcccagtgcaaatcctcctgcccataccgtgcacccttagaagcctgcgtgtgcatagagcgccccctacttcccagttaactcccagttcttctccctgagcttggtatttgtcatgtgccaactctgactctgaggtgggcagtgagggaagcagccccgggcctgcttgcttcctgtccccgaaatgttcgtttcttctgaagtaaatatacatatataaataaatgtataaatactgctttgtatctgaaaaaa

SEQ ID NO: 193 - DNA, 3331 bp, Homo sapiens
  misc_feature: Incyte ID No: 5982278CB1
gtcgccgccggcttcgcagagcaccgcgccttagccgcgaagttctagttcttgctgccggtcctaacgtcccgcagtcttcgccagccagccgtcccgcatgcgcgtttgggcggcgtggagcctgctgccatgaagtcagcgagagctaagacaccccggaaacctaccgtgaaaaaagggtcccaaacgaaccttaaagacccagttggggtatactgtagggtgcgcccactgggctttcctgatcaagagtgttgcatagaagtgatcaataatacaactgttcagcttcatactcctgagggctacagactcaaccgaaatggagactataaggagactcagtattcatttaaacaagtatttggcactcacaccacccagaaggaactctttgatgttgtggctaatcccttggtcaatgacctcattcatggcaaaaatggtcttctttttacatatggtgtgacgggaagtggaaaaactcacacaatgactggttctccaggggaaggagggctgcttcctcgttgtttggacatgatctttaacagtatagggtcatttcaagctaaacgatatgttttcaaatctaatgataggaatagtatggatatacagtgtgaggttgatgccttattagaacgtcagaaaagagaagctatgcccaatccaaagacttcttctagcaaacgacaagtagatccagagtttgcagatatgataactgtacaagaattctgcaaagcagaagaggttgatgaagatagtgtctatggtgtatttgtctcttatattgaaatatataataattacatatatgatctattggaagaggtgccgtttgatcccataaacccaaacctccacaatctaaattgcttcgtgaagattaagaaccataacatgtatgttgcaggatgtacagaagttgaagtgaaatctactgaggaggcttttgaagttttctggagaggccagaaaaagagacgtattgctaatacccatttgaatcgtgagtccagccgttcccatagcgtgttcaacattaaattagttcaggctcccttggatgcagatggagacaatgtcttacaggaaaaagaacaaatcactataagtcagttgtccttggtagatcttgctggaagtgaaagaactaaccggaccagagcagaagggaacagattacgtgaagctggtaatattaatcagtcactaatgacgctaagaacatgtatggatgtcctaagagagaaccaaatgtatggaactaacaagatggttccatatcgagattcaaagttaacccatctgttcaagaactactttgatggggaaggaaaagtgcggatgatcgtgtgtgtgaaccccaaggctgaagattatgaagaaaacttgcaagtcatgagatttgcggaagtgactcaagaagttgaagtagcaagacctgtagacaaggcaatatgtggtttaacgcctgggaggagatacagaaaccagcctcgaggtccagttggaaatgaaccattggttactgacgtggttttgcagagttttccacctttgccgtcatgcgaaattttggatatcaacgatgagcagacacttccaaggctgattgaagccttagagaaacgacataacttacgacaaatgatgattgatgagtttaacaaacaatctaatgcttttaaagctttgttacaagaatttgacaatgctgttttaagtaaagaaaaccacatgcaagggaaactaaatgaaaaggagaagatgatctcaggacagaaattggaaatagaacgactggaaaagaaaaacaaaactttagaatataagattgagattttagagaaaacaactactatctatgaggaagataaacgcaatttgcaacaggaacttgaaactcagaaccagaaacttcagcgacagttttctgacaaacgcagattagaagccaggttgcaaggcatggtgacagaaacgacaatgaagtgggagaaagaatgtgagcgtagagtggcagccaaacagctggagatgcagaataaactctgggttaaagatgaaaagctgaaacaactgaaggctattgttactgaacctaaaactgagaagccagagagaccctctcgggagcgagatcgagaaaaagttactcaaagatctgtttctccatcacctgtgcctttactctttcaacctgatcagaacgcaccaccaattcgtctccgacacagacgatcacgctctgcaggagacagatgggtagatcataagcccgcctctaacatgcaaactgaaacagtcatgcagccacatgtccctcatgccatcacagtatctgttgcaaatgaaaaggcactagctaagtgtgagaagtacatgctgacccaccaggaactagcctccgatggggagattgaaactaaactaattaagggtgatatttataaaacaaggggtggtggacaatctgttcagtttactgatattgagactttaaagcaagaatcaccaaatggtagtcgaaaacgaagatcttccacagtagcacctgcccaaccagatggtgcagagtctgaatggaccgatgtagaaacaaggtgttctgtggctgtggagatgagagcaggatcccagctgggacctggatatcagcatcacgcacaacccaagcgcaaaaagccatgaactgacagtcccagtactgaaagaacattttcatttgtgtggatgatttctcgaaagccatgccagaagcagtcttccaggtcatcttgtagaactccagctttgttgaaaatcacggacctcagctacatcatacactgacccagagcaaagctttccctatggttccaaagacaactagtattcaacaaaccttgtatagtgtatgttttgccatatttaatattaatagcagaggaagactccttttttcatcactgtatgaattttttataatgtttttttaaaatatatttcatgtatacttataaactaattcacacaagtgtttgtcttagatgattaaggaagactatatctagatcatgtctgattttttattgtgacttctccagccctggtctgaatttcttaaggttttataaacaaatgctgctatttattagctgcaagaatgcactttagaactatttgacaattcagactttcaaaataaagatgtaaatgactggccaataataaccattttaggaaggtgttttgaattctgtatgtatatattcactttctgacatttagatatgccaaaagaattaaaatcaaaagcactaagaaatacaaaaaaaaa

SEQ ID NO: 194 - DNA, 10231 bp, Homo sapiens
  misc_feature: Incyte ID No: 1097030.1
agatcttggaacgagacgacctgctctctctcccagaacgtgtctctgctgcaaggcaccgggccctttcgctctgcagaactgcacttgcaagaccattatcaactcctaatcccagctcagaaagggagcctctgcgactcattcatcgccctccaggactgactgcattgcacagatgatggatatttacgtatgtttgaaacgaccatcctggatggtggacaataaaagaatgaggactgcttcaaatttccagtggctgttatcaacatttattcttctatatctaatgaatcaagtaaatagccagaaaaagggggctcctcatgatttgaagtgtgtaactaacaatttgcaagtgtggaactgttcttggaaagcaccctctggaacaggccgtggtactgattatgaagtttgcattgaaaacaggtcccgttcttgttatcagttggagaaaaccagtattaaaattccagctctttcacatggtgattatgaaataacaataaattctctacatgattttggaagttctacaagtaaattcacactaaatgaacaaaacgtttccttaattccagatactccagagatcttgaatttgtctgctgatttctcaacctctacattatacctaaagtggaacgacaggggttcagtttttccacaccgctcaaatgttatctgggaaattaaagttctacgtaaagagagtatggagctcgtaaaattagtgacccacaacacaactctgaatggcaaagatacacttcatcactggagttgggcctcagatatgcccttggaatgtgccattcattttgtggaaattagatgctacattgacaatcttcatttttctggtctcgaagagtggagtgactggagccctgtgaagaacatttcttggatacctgattctcagactaaggtttttcctcaagataaagtgatacttgtaggctcagacataacattttgttgtgtgagtcaagaaaaagtgttatcagcactgattggccatacaaactgccccttgatccatcttgatggggaaaatgttgcaatcaagattcgtaatatttctgtttctgcaagtagtggaacaaatgtagtttttacaaccgaagataacatatttggaaccgttatttttgctggatatccaccagatactcctcaacaactgaattgtgagacacatgatttaaaagaaattatatgtagttggaatccaggaagggtgacagcgttggtgggcccacgtgctacaagctacactttagttgaaagtttttcaggaaaatatgttagacttaaaagagctgaagcacctacaaacgaaagctatcaattattatttcaaatgcttccaaatcaagaaatatataattttactttgaatgctcacaatccgctgggtcgatcacaatcaacaattttagttaatataactgaaaaagtttatccccatactcctacttcattcaaagtgaaggatattaattcaacagctgttaaactttcttggcatttaccaggcaactttgcaaagattaattttttatgtgaaattgaaattaagaaatctaattcagtacaagagcagcggaatgtcacaatcaaaggagtagaaaattcaagttatcttgttgctctggacaagttaaatccatacactctatatacttttcggattcgttgttctactgaaactttctggaaatggagcaaatggagcaataaaaaacaacatttaacaacagaagccagtccttcaaaggggcctgatacttggagagagtggagttctgatggaaaaaatttaataatctattggaagcctttacccattaatgaagctaatggaaaaatactttcctacaatgtatcgtgttcatcagatgaggaaacacagtccctttctgaaatccctgatcctcagcacaaagcagagatacgacttgataagaatgactacatcatcagcgtagtggctaaaaattctgtgggctcatcaccaccttccaaaatagcgagtatggaaattccaaatgatgatctcaaaatagaacaagttgttgggatgggaaaggggattctcctcacctggcattacgaccccaacatgacttgcgactacgtcattaagtggtgtaactcgtctcggtcggaaccatgccttatggactggagaaaagttccctcaaacagcactgaaactgtaatagaatctgatgagtttcgaccaggtataagatataattttttcctgtatggatgcagaaatcaaggatatcaattattacgctccatgattggatatatagaagaattggctcccattgttgcaccaaattttactgttgaggatacttctgcagattcgatattagtaaaatgggaagacattcctgtggaagaacttagaggctttttaagaggatatttgttttactttggaaaaggagaaagagacacatctaagatgagggttttagaatcaggtcgttctgacataaaagttaagaatattactgacatatcccagaagacactgagaattgctgatcttcaaggtaaaacaagttaccacctggtcttgcgagcctatacagatggtggagtgggcccggagaagagtatgtatgtggtgacaaaggaaaattctgtgggattaattattgccattctcatcccagtggcagtggctgtcattgttggagtggtgacaagtatcctttgctatcggaaacgagaatggattaaagaaaccttctaccctgatattccaaatccagaaaactgtaaagcattacagtttcaaaagagtgtctgtgagggaagcagtgctcttaaaacattggaaatgaatccttgtaccccaaataatgttgaggttctggaaactcgatcagcatttcctaaaatagaagatacagaaataatttccccagtagctgagcgtcctgaagatcgctctgatgcagagcctgaaaaccatgtggttgtgtcctattgtccacccatcattgaggaagaaataccaaacccagccgcagatgaagctggagggactgcacaggttatttacattgatgttcagtcgatgtatcagcctcaagcaaaaccagaagaagaacaagaaaatgaccctgtaggaggggcaggctataagccacagatgcacctccccattaattctactgtggaagatatagctgcagaagaggacttagataaaactgcgggttacagacctcaggccaatgtaaatacatggaatttagtgtctccagactctcctagatccatagacagcaacagtgagattgtctcatttggaagtccatgctccattaattcccgacaatttttgattcctcctaaagatgaagactctcctaaatctaatggaggagggtggtcctttacaaacttttttcagaacaaaccaaacgattaacagtgtcaccgtgtcacttcagtcagccatctcaataagctcttactgctagtgttgctacatcagcactgggcattcttggagggatcctgtgaagtattgttaggaggtgaacttcactacatgttaagttacactgaaagtgttcatgtgcttttaatgtagtctaaaagccaaagtatagtgactcagaatcctcaatccacaaaactcaagattgggagctctttgtgatcaagccaaagaattctcatgtactctaccttcaagaagcatttcaaggctaatacctacttgtacgtacatgtaaaacaaatcccgccgcaactgttttctgttctgttgtttgtggttttctcatatgtatacttggtggaattgtaagtggatttgcaggccagggagaaaatgtccaagtaacaggtgaagtttatttgcctgacgtttactcctttctagatgaaaaccaagcacagattttaaaacttctaagattattctcctctatccacagcattcacaaaaattaatataatttttaatgtagtgacagcgatttagtgttttgtttgataaagtatgcttatttctgtgcctactgtataatggttatcaaacagttgtctcaggggtacaaactttgaaaacaagtgtgacactgaccagcccaaatcataatcatgttttcttgctgtgataggttttgcaagccttttcattattttttagcttttatgcttgcttccattatttcagttggttgccctaatatttaaaatttacacttctaagactagagacccacattttttaaaaatcattttattttgtgatacagtgacagctttatatgagcaaattcaatattattcataagcatgtaattccagtgacttactatgtgagatgactactaagcaatatctagcagcgttagctgtccatatagttctgattggatttcgttcctcctgaggagaccatgccgttgagcttggctacccaggcagtggtgatctttgacaccttctggtggatgttcctcccactcatgagtcttttcatcatgccacattatctgatccagtcctcacatttttaaatataaaactaaagagagaatgcttcttacaggaacagttacccaagggctgtttcttagtaactgtcataaactgatctgaatccatgggcatacctgtgttgcaggtgcagcaattgcttggtgagctgtgcagaattgattgccttcagcacagcatcctctgcccacccttgtttctcataagcgatgtctggagtgattgtggttcttggaaaagcagaaggaaaaactaaaaagtgtatcttgtattttccctgccctcaggttgcctatgtattttaccttttcatatttaaggcaaaagtacttgaaaattttaagtgtccgaataagatatgtcttttttgtttgttttttttggttgtttgttctgttttttatcatctgagattctgtaatgtatttgcaaataatggatcaattaattttttttgaagctcatattgtatctttttaaaaaccatgttgtggaaaaaagccagagtgacaagtgacaaaatctatttaggttctctgtgtatgaatcctgattttaactgctaggattcagctaaatttctgagctttatgatctgtggaaatttggaatgaaatgcaattcattttgtacatacatagtatattaaaactatataatagttcatagaaatgttcagtaatgaaaaatatatccaatcagagccatccctaaagagtgttctcttgtcttcctttgtatcctctttggctccttcccttagcttccaccccagacatcagacctggggctgccttctctccctgccaaagcttgctgttagcattgtctgcttgccctcaactcctgccttgttccctgttgaaatgtatcaatcccgtactttatctctccaggacaaggataagtgtggctacagtaaaagtttattgctctaaacggcgctaacctgagataatgagaaaaggccagaagagattgtttgatctctgtctgtcaatatatatgcatttcaactgtgaccatctggatccaggccctttctaacctatataacgactcatttgtttggttaatgatgaatatcactggggctcttaagtcctttcgttctatccaagacttcattgtttttttctgtatgaaaaaagtgcagaatatcactcacctttcccctacttttggatcccctacacgaggatcactagcttaatgagaagcagagtaacgctattaagtctgggcaagctccttataagttgctgtgtgcttaaaagaatgtgatttatgtctggggccaaagcagttttccttcttttccctcattgaattcaagacagctagacccttgtgtagatcccaggatattacctctactccccccaacctgtgtgtgtagggagagtaacaacacgggaagaggggagggaagttggaaggagattggtcacatgttcagttgtctgagatactggtaaatgtgcgctgtttgtcaatgaaggttgcatgcctgcatttacaaggtggtctcatactgattgtgctctgtccagttagattcgtggcttctcccttggaagctacaattaaggactagttagaagcagaggctagatgtgttctctccagcccttactaactgggaaaataattgagaaatccctcttttcctcagtgaaagcccagtcattggttagaaaaatctaattgtcaaactagcattatgttccatcatatctgtgggatagtaattcatgtaagacacatttttacctctcttacaagtcaattcacttacaagccagtttcaaatcaagcttcccttgcgaggaatggagatcattatggggcttattatgactacatttcttttatgagtgaccattttaaataattaatattttatttaatattaaattattaaagacttagctagacttttaacattagatgaaccttgtgaatcatatattgcatagattagcacatgtatgcaatctaggtcatcaatttgttgaatttatacagccctagatttgagattgtggccctgagtatctggatagttgagttgtgtgtttatgtgcttatatgatagaggtgctttgttcctgcagcttagaaacagaagcagccattcactgagaagcttaagagaggaagtatcaacctcattttccaaaccagcattactttcaccgctcgtggatctgaaagattacatttagaacatttagtactattacactctcagaaactgtggtaaaaagtcacattttcaaaacttcatgcatattgtattcttgttggaaataagtcctatagtttcttaattgtcttcatgccgtccatatttaacaaacattgcaagtcctttttatatttgggtaattatttgtaatttagtgaaggagactaggggatgttttcttccaaagggaatttaaaatcaattttatggtattttgaaagtaaaatactccttaacgtgtcaatatttttaaaatgttatctcgaagttttctattgctcaggtatataatctaataaaattttttgtttgctctaaggttatttttgctattctctattttgaattatgttaaaatttgtgtgcattttatgaaatgccttttttcttattttgaaagtgtaaaattgggcatctcagagtaaaatgtgggattattagctacaaagactaggcacatcgtgaaagctcagtaactaattttcttgactgagtcctatgccagagtgtcacagattcaacagaattttcctgaagggtgatacacaccaaaatctagcttgtgtggatctgagactattgactcaaagattcaaatctacttcggaagtgactccacggtttgagtgaaaactgaggaaggactcatgcctgtatatcactagatatcttatttctccataattttaagtgttcataatttcttcttctttgatgggtgtgcaactggggcatgtttgtaccagccagcatgtgttctgcccaacagtgtgtccgtgtgtgaggttaactgattcagaactcattctcttgataaactatttcttgaaagcatttattttaagtctttatttcctgctgaaatgaagtttcatgctgtcatgcccatcttatttattctagaagaaaattttcatagaagaaaatgatttatggccaaagttacagaacattcatcttttagacttagccttagaatatcattggaaattacttggcttgaatttggttcgtttttatctttatggattatgtaccagggctattaataatacttaaaccccttattttgctatggtggttagatttttttattccttttcaattagtgctattaattattacatggtcgtattcatgcttattacagatgaactatttttagtgccagtgtaaaggattaagaataacattcaattagttggctatttcaggctttattgtacatggtaatgtttcagggagtgtgatttggtctagaatatatccagatccttgtaattatgatattgggttatgacaggattctattatttttagctatgaatggtgcttatttttccctatattaggaatgttaatatttggattatcagagtccatgttataaacagaatttacctatgcaagacaaattctaactgtgcaacattttcatgagaattaaaagttgtgtgttaaggggaaaaccctctgaatgtttttatgtgtaagtgcctaaagaaccgtagaaacagtacatcaaaagctcttataaaagaaaaactgattgaacattagccagaaacaaaatatgatttacatttttttttttggttgctgggactgaataccctaaaaactaagagatgtgagtggggaaaatgtctaattgataagaaagttgatttatattatatttacatgcatcttctaagattgcctttacagtagccaatcagaactttaaaaaaaaaaaagctaacaacatagatcctatgtgttgcccttaagactaaaatactttgcacacgtgattgaatggctcacttaagttgttgaatttccttatacatttaaagtgtacttccgttaagaattattccattttaaatgggtaactttcagcttccgaactattttcctaaacattccagttgtgtattataaaagatcaaaatatctctaggtggtagtacaattttcatttataacgtggaaaagttaactgttaggtttaacattagtattagtgtttttgcaattgctcatagaaaagaacactgaataatggttttcatacaatttttgtaaaacattcttctcccagtttgattccaaatgcttttccccaaattgtctaatatatcataagctagtgtttccttgtatttaatttttccttccaacacaatatttaggaaaaatatgaataacattgtgagtagcgggagacaacacgaaaaagaaacctttcattgttgtggaggggtaggtgttatgtgattgatgcccttcctggcgtttgttttatcctgttattttctcaaaaaagagcacggctttttcttaaatacgtttaaattcagaattgcttgcaaaagattggcctggatagatagacatcctagatttaagatagtaccatcttaaaagtatgttgaaaggtaaaataaatcatttcaaaatacttaactttcctaataaggatgttaggttttcttctctttcattagctggccataagtcaaggtccttataacactaggaaattacctttttttactttcaaaattgcattatagtgaattactgtttacaaaatacacatactgtgaacagatataagtttctgtcttttataaggtttgtagaatgaatgtttttttaaagtgagtattatatgttaaatattttaagttttttataaatactagtaactgtttactaatttttgtttggtcaaatgcttgtaaatgtagctgaaagaagatagggagaaactgcggatcccaaactgttccctttttcatttcttgaaatgttaccactacagacatttttttaaggtgaataaacagttgtgatgtgctgtacctaaaatcatgtttaatcgtataaggaaacatttcaatacacttatacaggaagaaaactatagatgaagtacatgtgtgtgattcagtctgattcacagaattctgagagtaatatggaataaaacaactccacttagatgataactgaagcatttcctgccttgtgaaaatttggattttaaattgctgttagaatgggaaatttggacactttatatcattgtataatttcagaatttagtttctgtatcttttggaaaacatgattatagcaaaaacatagaaaataatctattactaaaacaccataaatgtaaaactagtatgcttggctgttaactctaaagatgttacttatgtctgtttttaaaacatgcatgtatttaacaattttatcatagtattgtcatggaaaaaataaatatattttcttacatcttacactgacagacttgggcattattgggtttttccccatgttacacacttaggagaagtggctctgctttgttgttgtatttttttgttctatcccgtaagaaatacagtggttgtaaagcaaaaaaaa

SEQ ID NO: 195 - DNA, 2913 bp, Homo sapiens
  misc_feature: Incyte ID No: 1100509.4
  unsure 2863: a, t, c, g, or other
gcagctcagtggcccgagaaaggcaggagccgctgggtttaggaggtccccgggttgccggcggcgacagcgggggaagcatgactgctgtgggccgaaggtgccccgcgctggggtcccgaggggctgctggagagccagaggctggcagcgactatgtgaagttctccaaggagaagtacatcctggactcatcgccagagaaactccacaaggaattggaggaggagctcaaactcagcagcacggatctccgcagccatgcctggtaccatggccgcatcccccgagaggtctcggagaccttggtacaacgcaacggcgacttcctcatccgggactcactcaccagcctgggcgactatgtgctcacgtgccgctggcgcaaccaggccttgcacttcaagatcaacaaggtggtggtgaaggcaggcgagagctacacacacatccagtacctgtttgagcaggagagctttgaccacgtgcccgccctcgtgcgctatcatgtgggcagccgcaaggctgtgtcagagcagagtggtgccatcatctactgcccggtgaaccgcaccttcccactgcgctacctcgaggccagctatggcctgggacaggggagtagcaagcctgctagccccgtcagcccctcaggccccaagggcagccacatgaagcggcgcagcgtcaccatgaccgatgggctcactgctgacaaggtcacccgcagcgatggctgccccaccagtacgtcgctgccccgccctcgggactccatccgcagctgtgccctcagcatggaccagatcccagacctgcactcacccatgtcgcccatctccgagagccctagctcccctgcctacagcactgtaacccgtgtccatgccgcccctgcagccccttctgccacagcattgcctgcctcccctgtcgcccgccgttccagtgagccccagctgtgtcccggaagtgccccaaagacccatggggagtcagacaagggcccccacaccagcccctcccacacccttggcaaggcctccccgtcaccatcactcagcagctacagtgacccggactctggccactactgccagctccagcctcccgtgcgtggcagccgagagtgggcagcgactgagacctccagccagcaggccaggagctatggggagaggctaaaggaactgtcagaaaatggggcccctgaaggggactggggcaagaccttcacagtccccatcgtggaagtcacttcttccttcaacccggccaccttccagtcactactgatccccagggataaccggccactggaggtgggccttctgcgcaaggtcaaggagctgctggcagaagtggatgcccggacgctggcccggcatgtcaccaaggtggactgcctggttgctaggatactgggcgttaccaaggagatgcagaccctaatgggagtccgctggggcatggaactgctcaccctcccccatggccggcagctacgcctagacctgctggaaaggttccacaccatgtccatcatgctggccgtggacatcctgggctgcaccggctctgcggaggagcgggcagcgctgctgcacaagaccattcagctggcggccgagctgcgggggactatgggcaacatgttcagcttcgcggcggtcatgggtgccctggacatggctcagatttctcggctggagcagacatgggtgaccctgcggcagcgacacacagagggtgccatcctgtacgagaagaagctcaagccttttctcaagagcctcaacgagggcaaagaaggcccgccgctgagcaacaccacgtttcctcatgtgctgcccctcatcaccctgctggagtgtgactcggccccaccagagggccctgagccctggggcagcacggagcacggcgtggaggtggtgctggctcacctggaggccgcccgcacagtggcacaccacggaggcctgtaccacaccaatgctgaagtcaagctgcaggggttccaggcccggccggagctcctggaggtgttcagcacggagttccagatgcgccttctctggggcagtcagggtgccagcagcagccaggcccggcgctatgagaagttcgacaaggtcctcactgccctgtcccacaagctggaacctgctgtccgctccagcgagctgtgaccccagggacatttcccctctgcagctgcggacagcgtcaggggcagaggggcacacaactttccccagagcaccccaaggacactgtgatcaacccgagaatgttctgggttcaactcaagcatctcccttgcacctccagggtcctgcgtggactctgggttccatcccacctgctacatgctcaccaggtctccattgaggaagaacaggaacgccggttcccccaccagcttttgctgctccccttcctgctggggttccctgttttcgagccatgggaggcaggctgctcacgcctcctcactctctgtctgtccctcaccaacaccaaggcctccatctcactgtaaataagtctctgttctgtaaatagatgtacagaagccatgttatttctttcatataataaacttttatgactctttattctgtctctcgggctcctggggtagaaggaagcaccttttctcaggcgaaaggtagaaaacttcattcaacaaatgttgtgagtgagtgccgagtatctggggccagtggcatgggagtaagaagaatttaccaagacagttgtaggtaaagaaaggcagatttatttcaggaagcatgaaaatgcattgcaaggtagcaacgggcagatcagcagaagaggagctgactgcaaagagacnaagccttgctgtgagtttttatgggatggcattctgctgtgtgctgaaca

SEQ ID NO: 196 - DNA, 3477 bp, Homo sapiens
  misc_feature: Incyte ID No: 199671.1
ggcaccatcccacagtactggcggtttctctgccaagtgtttggggcctgcactggccaagccatccgtcactgggactttgcagtgtgccctgtgggtggcgtgtggacaccggtccgggcaggaaggaaaagcatgccccggtgaaaacccaccgagcagagagccagcgggacctcctcagcattccacccaggggaagagttcagtccccatgaagataaggactgagttatttggctgcacctctcctcagcctcaaagctcagacctgctagagtgggttcacctggctgttggttctgtgggagagttcctgacaagctggttcctacatggtgcagtgaaaggaactctgtcctggaagtccccaatgccgcctctcagtcctgcctgtcaccaaccacctggggggcttgggcaagctactcaacctctggggctcaatttccctaactgtaaaatgggattgtaatcccttccctgcctgacgcaggaattgttatgaggcccagatgagatgaaagtcagcggtcagggctctgtaagttgaaaatggctggatgtgtgtggccctgccactgcagggatggcccaaggtcacacagaaagtttgctgcaggaggagccctccccaccagtcttcatcgcttgccctgcttctcacttaggcagatgtcaaccagaatgagatacagccaatttggctttgatgacccagctgagagggaaatttagatacaattcaggaatatcatgcccaaaaatagtggtcccagcaaccaggacacagagggaagacctggatattgtcagtgattggtggagggggacatcttggaccctcctaggcctggtgtcacatctcccatctctcagaccccacagaggccaaggggccttggctctgacccaggttaaagagagccaccagcccccaggctcagggagctgaaaccacccatccgcagaaatctaagggcaaggagaaatagaaattgtctgttccttcccttcaaagtgtaaggcctcttccaggagcaactggagccaccacagcttctcagtgacattgggagggcttcgggcccaggaaaaacccaagccttttgtcctgagagccgagccacagcggatgcagtggcgtcagcatcccagagcggcagcttctctcctgcctgtcactggggactggttgctctccacccatccaggaggaaggggttaggtcccagtcttacactcttatagggtctcatggacataggcctatgcctgttctgatatctataattttttaaactcaaaaggaccaaaacactcctgaaccctcatctatacggcctgcactgggcttggtgtttcctcctggcccaggcagctccatctcttctgccattcctcctggacgaaagtggcaggaccccacctctaccacttccccacagggtcactgcacagcggcttcaaagacacgccctgttgaaggggaaacatcctccccccatcacactccaactcgtcaccccaaaagggaagtcaaagcacaggtccgtggggcctatggtttgtagacactgacacagtggttttcaaaccaggtgctgcggaacccctgatattccacagagctttgtcaggggatgctaaagtgggaagatgggagtggaggcaaaggataggtttccagccctcctcccatttccgccgccaccagaataactctgcttttatctgtcttgcctactgagatttcattttcaagctttctttgaagaagaacttcaaaccaccatctcgaggtttgatcttagaccagccagcacaggttctattcttgctgttcatgttggaatggctccagcgttccagtacaaagtgtctttgtgttggaacttgggtcacagacccaggcacaagcatttatacacacacacacacacacacacacacagacacacacacgtacatagttgatggtttttctagccaacccaccctgaagctctggccaaggtttgatttggacagggacctggtgctcagtggggatgggtcgtgaccctgatattggcccatgaagcatggggagctctggagcaaggaaacaggctcaatcccccactgaggacttgtgtctgcacccctatctggcaccccactttcctggcctaggcccaagggacacagcaggagaagcagtgtgataggagagaggctagggttaaattcatctttacacagcgccggatggatggaaatcttggctcacataaaagacagactcagggaggattttatgacaaaagtccctcctttgagggcaggattcccccaggaatcctggacactttagtgagaactggaccagcccttggcacaaaaccctgcctgccctgtcccccactcccaccccccagggaattctaggtgaaaatgtgaagctcagggcacagcaagcgcatgacacgggtgtattacattcggtccgagtgtgtccttagtttccctgtgtgcaaaatggggctagtccaggctcttcccacctcactgggacaattgcaagggtcataggagaggtgggtatgataggtggtcatatgaggtggtgagtatgagaggtgggtgcctcacaaactcggggtatggtcctgacctgcatggcagatgagcagagcacttgggaacgagcataggaagtgccatcttcccgggcatctctgctcagtgttaaggtctagccacagacactgtgggacctgcctcttcctatggaatgggggcctgcatgggttgtgtcctggggcaggagtgagggatggctgggaagaatctccaggtctgtggcccttgtgttgagtgattattttgtgacactctcattcctggaccacctgccaggtttatctgttatacctgtggcattcttattatgtcagacaagttattatagttcattcaactctaacaaatgaacaaaagaacaataaataggaggccattaaaggtcttttgtggcagagaaatagggctagacaggggaagaaactgtcaatatttgagtttgaggaggctgacgtttgctttctggtgcttccttgtaaactgaaacttcagcttacagctgagggcctaagtaaaatttcttagtagtaggaattgttagctgtcctgctaccttctttcataagaaataccgtaacgttttatttccatctaaaaatatattcaaaaaccagtcttttcgtgtagaaccaaacacttttaaattagtatgcccccagtcatttatagttgtgaggcatacaatttcacagcacttaatttttttagcaactgctttttatctcttgctaaaatatttatcttaattttctagaagcaactctatatttggcattatttggttcatttatatatttagttaaatcatgtcattaaagtaagtacagctgggggacacaacataacttactc

SEQ ID NO: 197 - DNA, 3416 bp, Homo sapiens
  misc_feature: Incyte ID No: 232137.20
cctcccgggaagagcttccgtgttcaggtgcttggggccccaccctaggagcctgactcacagtcagagcagggtcccggcttgtgttcaggattttgaaacatttgtaaggtgattttgttgtttctacacctttctcctcatcttttttttttgtagttaatcgttactaataacagaaaagacatttttggcatggtaattggcacaaagtgaataattgttgaatagatgacttttgaggctttcaaaattcgagtgtccataaaatccatccagagccacctggttcctttttttgaaccacttaacgtaattctggaaaaccttgactgtgggtcttaagtttggtggattgctgcttctcactggctgacctttggaggtcgcatatttcaggatgtgactccacttaggctccatttcacctgacactgcaattctgtgccttcagagggatttgttattgcgaatgatgtggacaacaagcgctgctacctgctcgtccatcaagccaagaggctgagcagcccctgcatcatggtggtcaaccatgatgcctccagcatacccaggctccagatagatgtggacggcaggaaagagatcctcttctatgatcgaattttatgtgatgtcccttgcagtggagacggcactatgagaaaaaacattgatgtttggaaaaagtggaccaccttaaatagcttgcagctacatggcttacagctgcggattgcaacacgcggggctgaacagctgggctgaaggtggaaggatggtgtattccacgtgttcactaaaccctattgaggatgaagcagtcatagcatctttactggaaaaaagtgaaggtgctttggagcttgctgatgtgtctaatgaactgccagggctgaagtggatgcctggaatcacacagtggaaggtaatgacgaaagatgggcagtggtttacagactgggacgctgttcctcacagcagacacacccagatccgacctaccatgttccctccgaaggacccagaaaagctgcaggccatgcacctggagcgatgccttaggatattaccccatcatcagaatactggagggttttttgtggcagtattggtgaaaaaatcttcaatgccgtggaataaacgtcagccaaagcttcagggtaaatctgcagagaccagagaaagcacacagctgagccctgcagatctcacagaagggaaacccacagatccctctaagctggaaagtccgtcattcacaggaactggtgacacagaaatagctcatgcaactgaggatttagagaataatggcagtaagaaagatggcgtgtgtggtcctcctccatcaaagaaaatgaagttatttggatttaaagaagatccatttgtatttattcctgaagatgacccattatttccacctattgagaaattttatgctttggatccttcattcccaaggatgaatttgttaactcggactacagaagggaagaaaaggcagctctacatggtttctaaggagttgcggaatgtgctgctgaataacagtgagaagatgaaggtgccagccgcacagacgctgagtgctgtgtgatgcgggatgcgtgtggcttttcacagcggcttagatttcatttggagcagaccgtgacatctgccctccccacctgtagcgctggctgtgggtccctgagcctgccctttgatttcagagctgttgactgacacagggctgaatggttcctgccagagtcctgaatctggtggcctgtgtcttttctgtgccccattcccgcaggggggtgagccatggtgtagttctcacagctcgccctcctgggcagagaaggtactaaaggtgtagaggctgcgagtactgctgccccgacccttgggatttgtcctttgaggtacttcccttagaatttggccatttgggggcccttctttcatttgctttactgtcctccaaacgacgtaatcacaagttgtgagtatcagttcgttcttaaccggggtttctcggtgggtttctgcttctcctctcctttcccattccgtgacggttgctccatgtggcccggcatccttacaggagatggtcctgtcttcatctctctgtgtttcatcttatttttttacttacaggttattaacacggggatcaaagtctggtgtagaaataacagcggtgaagagtttgactgtgctttccggctggcacaggagggaatatatacattgtatccatttattaactcaagaattattactgtatcaatggaagatgttaagatactgttgacccaggaaaatcccttttttagaaaactcagcagtgagacctacagtcaagcaaaggacctggcaaagggaagcatcgtgctgaagtatgaaccagattctgcgaatccagacgctctgcagtgtcccatcgtcttatgcggatggcggggaaaggcctccattcgaacttttgtgcccaagaatgaacggcttcattatctcaggatgatggggctggaggtattgggagaaaagaagaaggaaggggttatcctcacaaatgagagtgcagccagcaccggacagccagacaatgacgtgactgagggacagagagcaggagagcccaacagcccagatgcagaagaggccaacagtccagacgtgacagcaggctgtgacccggcgggggtccatccaccccggtgagcaggcccaaggcagcgggggcccacacccctcacacgcaaaactggcttcttctggtcactggtgtctgaaaccaaatccagagcagcctgtggcctgtaaagcatatatttctaatgactgcagactggtgggatcataggagccttctgaatgaccaggactgctttctttggagctgatgaaaatgtactcttttagcgtgttagaaatcacttgttttattttgtttctttggccaagctgggtctagtgtttcttttgctgggaatagactttcaaaagttgtacttctatcaagaaacaaaactgcccttgcagaaatttcaggtcttttgttaagcctgtattggtcttaaggtgcagtattttttaaattattatttatagaaagaatctataaattcttggggaagtgtgttataagctttaataattacattgagctgcacctcagtggtgtgtcattaacatgcagtggggttaatatctgaggcctcagatgactttgtgccttttggaataaagggtaaaataaactctcccagagtaagagctgtatcgtgaattgtcatactaattattgagggggacttatgtgcttttattgaatggagtgctttacaatttttatttttaaatggggttgggatccttggaatatttcaataaaattgataaaatataaaaaa

SEQ ID NO: 198 - DNA, 1683 bp, Homo sapiens
  misc_feature: Incyte ID No: 898608.2
cttgaagtggtaaggcagattatctgtgctgctcaagaacatgtgaaggaaaaaagacgaagtgcagaagttgatgatggggctgctgaaaaggaaactctgccagagtttggagagggaaaggacaccggaggacttgtgcctggaaagtctttggtctttgcaacactggaattgtgtgtatgcattctagttagacagctcccagaattaaaccctaaattgacaggtagcccaggagtaaaagctacgaagccacagatactattagaagatggaagtagattggtttcagctgcattggttatcctttccgaacttcctgcagtgtgctctcctgaaggaagcatctcaattctccctactatattgtacctcacaatcggggtcctcagagagactgctgtgaagttacctgggggccagttatcttcgacagttgcagcttccctacaggctctaaaaggaatattatcttctcccatggcccgggcagaaaagagccgtactgcttggactgaccttctccgaagtgccttaacaacaattcttgactgttgggatccagttgatgaaacacaccaagaacttgatgaagtcagtctacttactgctatcacagtgtttattttgtctaccagtccagaagtaactaccatcccatgccttcagaagcgctgtattgataaatttaaagctactcttgagataaaagatcctgtggtacaaatcaagacctaccagctcctacattccatctttcagtatccaaatccagctgtttcctacccatacatttactctttagcatcctgtatcatggaaaaactgcaggaaatagacaagagaaaacctgaaaacactgctgagcttgagatcttccaagaaggcataaaggtcttagaaacactggttactgttgctgaagaacaccatcgcgctcagctggtggcctgtcttttgcccatcctcatttccttccttttggatgaaaattctctgggatcagcaacttccataatgagaaatttacatgactttgctctacaaaatctcatgcaaattggacctcagtattcatctgtttttaaaagtttagtggcttcttctccagccctaaaagcccgccttgaggctgctataaagggcaatcaggaaagtgtcaaagtcaagataccaacatctaaatatactaagagtcctggaaaaaactcaagcatccaattaaagaccagtttcctctgattttttttttggaatagtaagcaccttaatataataaatacttgatcattgcctttggtgacaaaagggacattgtagacacaagtgcccttagaggtctagttgattgttttaccttaaatagctgtgactcttcaaagtaacagcatacttaacatttttgtgtgtgtgcgtggggtttgtgttttgttttgttttgtttttctatttaaaaagacaatggagctaacttgccaggaattttaagaaagtgctaaagaactaaacttactaaacaatccactgctttaaaaatgaaatgaatttcttctaacagtccatacatatgtggtatacttaatactgtgacagatataaatatgactctagtgtaaattatctgcactaatattgtatcccaattgctgatttaaaattctgctttggcccggcacagtg

SEQ ID NO: 199 - DNA, 4564 bp, Homo sapiens
  misc_feature: Incyte ID No: 411373.3
accaccaccactaagccgtgtcatttctagggccatctcctctcagtcttacagccagcttgggtgtcccacctccaggcctctgcgcaaagggaatgtgggtctctctggtgatgttttcctaactgtatttgtgatgaaaacagggcattccagttccctcttgcccagcacaaccacatcagattcgacggctcaagaggggtatgagtctaggggaggaatgctggactggaagcatctgcttgactcacctgacagcacagaccctttgggggcagtgtcttcccataatcaccaagacaagaagggagtgattcgggaaagttacctcaaaggccacgaccagctggttcccgtcaccctcttggccattgcagtcatcctggctttcgtcatgggggccgtcttctcgggcatcaccgtctactgcgtctgtgatcatcggcgcaaagacgtggctgtggtgcagcgcaaggagaaggagctcacccactcgcgccggggctccatgagcagcgtcaccaagctcagcggcctctttggggacactcaatccaaagacccaaagccggaggccatcctcacgccactcatgcacaacggcaagctcgccactcccggcaacacggccaagatgctcattaaagcagaccagcaccacctggacctgacggccctccccaccccagagtcaaccccaacgctgcagcagaagcggaagcccagccgcggcagccgcgagtgggagaggaaccagaacctcatcaatgcctgcacaaaggacatgccccccatgggctcccctgtgattcccacggacctgcccctgcgggcctcccccagccacatccccagcgtggtggtcctgcccatcacgcagcagggctaccagcatgagtacgtggaccagcccaaaatgagcgaggtggcccagatggcgctggaggaccaggccgccacactggagtataagaccatcaaggaacatctcagcagcaagagtcccaaccatggggtgaaccttgtggagaacctggacagcctgccccccaaagttccacagcgggaggcctccctgggtcccccgggagcctccctgtctcagaccggtctaagcaagcggctggaaatgcaccactcctcttcctacggggttgactataagaggagctaccccacgaactcgctcacgagaagccaccaggccaccactctcaaaagaaacaacactaactcctccaattcctctcacctctccagaaaccagagctttggcaggggagacaacccgccgcccgccccgcagagggtggactccatccaggtgcacagctcccagccatctggccaggccgtgactgtctcgaggcagcccagcctcaacgcctacaactcactgacaaggtcggggctgaagcgtacgccctcgctaaagccggacgtaccccccaaaccatcctttgctcccctttccacatccatgaagcccaatgatgcgtgtacataatcccagggggagggggtcaggtgtcgaaccagcaggcaaggcgaggtgcccgctcagctcagcaaggttctcaactgcctcgagtacccaccagaccaagaaggcctgcggcagagccgaggacgctgggtcctcctctctgggacacaggggtactcacgaaaactgggccgcgtggtttggtgaaggtttgcaacggcggggactcaccttcattctcttccttcactttcccccacaccctacaacaggtcggacccacaaaagacttcagttatcatcacaaacatgagccaaaagcacatacctaccccatccccaaaacccccccaaacacacacatgcacacaacacatacacacacacgcacagaggtgaacagaaactgaaacattttgtccacaacttcacgggacgtggccagactgggtttgcgttccaacctgcaaaacacaaatacattttttaaaatcaagaaaatttaaaaagacaaaaaaaaaagaattcattgataattctaactcagactttaacaatggcagaagtttactatgcgcaaatactgtgaaatgcccgccagtgttacagctttctgttgcagcagataaatgccatgttgggcaactatgtcatagatttctgctcctcctctcttttaatgaaataacgtgaccgttaacgcaagtaactctttatttattgttcaccctttttttccttaaggaaaggactcttccaaatatcatcctatgaacagctcttcagaaagcccattgaaagttaaactatttaacgtgaaatccattaactggaataattgagtttctttatttttacaataaattcactgagtaaataagttggagctggaattctgagctttgtgtttggactgtctggtctgtagctaaaggaaaaagttaggaggggaatatttatttaaatctatcagttcattgcctggtcaggtctctggcctataaacatgcaaaaaaactaattcatgttaaagtccttccagatcctaatttctaaagcaatcaggagagaaagcttttagaatggcacatcatatctcattgatgccaacatggttttgtccatggttctgactttctgtgaaggcaccagcttgcaatatgccatcccatttcaccttgcatgtgagacagcaaacaaaatccacaaatggtgtgaactaatatgctggctgctaccttgcataaattaatgatttgatcacacgggttcttcgtggggttacatctgtgaatagcctgttttccacatgtaaatttgtgccttacaccttgagttgtgtacacttgtaaactctttatgatcaactgttcccccttttgaaataagtgcagatatttatttaaccctcccttccccaccctctgccccacttccagccctctgaaagattggagtcaagcagatggaagaatgcagtggtgatagttgtcatgcgacagcctgagaacgctgggcagcaccacaccctccaattcacactgccttctagttgtgccaactggaaccaccctttggctgtgctgcgaagcatggaccccagtgttgttgtgggtgtgtcaaatcccctttcatcctcaagagctccctgcttcccttagattatttcaatacggtgatatccttatttgctagcagaaaagggactaacgtcccattcctcttttctgctgcgtccactggctagagagcaggcggtgcgcggttgggcagacacctgggaggagtctccaagccatgtgcacagcacacacgtgcagtgcacacaaagaaatgacatggaaatagatgcaggcaggctggtccctgctgtgattaacgagtaactccaagtacaaggccgaccacaatggatgctgcaaaaacgttgactggggcaaaggattttttattttattttttattttgttaattatgtttttaggggatgggaggtggtgtgtgtttttctcctcttggttttcatttgctcaagcacacaaaagggacttttgtttactctatcatgaacaaaggaactgtccacatactgtaaaccatgagcagtgttgttgttgtttttttaaacagtatatttggtggtctctttgtctgcttttatttccagttcgatcttctgggtttagttttgtctttaaaaagaattcaaaaaaagactgacaatgacagttttgagttggatagtgaaaaagtggagcctccataatcagtgtggttgccttcagacctgagtacttagctgagggtgggtgagagccctttgttccaaaagtccattagttttgctgttgtttaggagtaggtggttgttgttggtgtttacactttttttttgtttggcttttgtaatggaatccatgttcacatcctgtgaactctgtctcctgaaaccctgaagtatttcctagaacctgaaatattgttttcttccttgaattttctctagaaatgcagaaattaggaaggtgatgggtctgtatccccctgcccccttctttcccatgcttgactcccgagagtactggcagtgcagcacccatcattgacgtaagcggctgtcttgtccagtgtttgtaggcatcactgcctcagctgttaaggagacctgtgtcaaaacttacatccacattcctacacccccacaacccatcacttctggtgttaaccctaaaatacccacatgtattgagctggtcttctgcatttaagtatttctccccagtttttttccccactgtgtgtggggggagggtccataaacccgagtgtgcctttgctttccacccttgctagacactggtagatgcaacaaactcagatttatatttgttgtaaagttgtaaaaatattgtgatgtcaccaattttccttccatctccacatcccctaacatctgattcacgacttaatgtatgttgtaagaaaagaaaaaagaaaagaaaaaaagggaaaaaagaaaagcaaggaaaaggctctttattacttaaaagtaataaaacctgactgttctatatt

SEQ ID NO: 200 - DNA, 1301 bp, Homo sapiens
  misc_feature: Incyte ID No: 1092387.17
ctgctccagacagtgtgctcaggggcgttgccagctcattgctcttatagcctgtgagggaggaagaaagaaacatttgccagccaggctagtgacagaaatggattcgaaatatcagtgtgtgaagctgaatgatggtcacttcatgcctgtcctgggatttggcacctatgcgcctgcagaggttcctaaaagtaaagctttagaggccaccaaattggcaattgaagctggcttccgccatattgattctgctcatttatacaataatgaggagcaggttggactggccatccgaagcaagattgcagatggcagtgtgaagagagaagacatattctacacttcaaagctttggtgcaattcccatcgaccagagttggtccgaccagccttggaaaggtcactgaaaaatcttcaattggattatgttgacctctaccttattcattttccagtgtctgtaaagccaggtgaggaagtgatcccaaaagatgaaaatggaaaaatactatttgacacagtggatctctgtgccacgtgggaggccgtggagaagtgtaaagatgcaggattggccaagtccatcggggtgtccaacttcaaccgcaggcagctggagatgatcctcaacaagccagggctcaagtacaagcctgtctgcaaccaggtggaatgtcatccttacttcaaccagagaaaactgctggatttctgcaagtcaaaagacattgttctggttgcctatagtgctctgggatcccaccgagaagaaccatgggtggacccgaactccccggtgctcttggaggacccagtcctttgtgccttggcaaaaaagcacaagcgaaccccagccctgattgccctgcgctaccagctacagcgtggggttgtggtcctggccaagagctacaatgagcagcgcatcagacagaacgtgcaggtgtttgaattccagttgacttcagaggagatgaaagccatagatggcctaaacagaaatgtgcgatatttgacccttgatatttttgctggcccccctaattatccattttctgatgaatattaacatggagggcattgcatgaggtctaccagaaggccctgcgtgtggatggtgacacagaggatggctctatgctggtgactggacacatcgcctctggttaaatctctcctgcttggtgatttcagcaagctacagcaaagcccattggccagaaaggaaagacaataattttgttttttcattttgaaaaaattaaatgctctctcctaaagattcttcacctaaaaaa

SEQ ID NO: 201 - DNA, 1587 bp, Homo sapiens
  misc_feature: Incyte ID No: 201906.5
tggtggtggtggggcggcctgagaagatattatggctgctgccacggagcataatcgcccgagcagcggtgacaggaacctggagcgaagatgcagccccaacctctcccgagaggtgctctacgaaatctttcgctccctacacaccctggttggacagcttgacctcagagatgatgtggtgaaaattacaatcgattggaacaagctccagagcctctcggcattccagcctgcattgctctttagtgcacttgaacaacacattttatatttacagccttttttagcaaaacttcagtctccgattaaagaggagaatacaactgctgttgaagagataggaagaacagaaatggggaacaaaaatgaagtaaatgacaaattttccattggcgacctacaagaggaagaaaagcacaaagaaagtgatttaagagatgtgaaaaagacacagatccattttgatccagaagtagttcagataaaggctggaaaagcagaaattgacagacgaatatctgcatttattgaaagaaagcaagctgaaatcaatgaaaacaacgtcagggaattttgcaatgttattgattgtaatcaagaaaatagttgtgcaagaactgatgcgatttttaccccttaccccggatttaaaagtcacgtaaaagtttctagagttgtgaatacatacggaccacagactagacctgaaggaattccagggtcaggtcataaacctaacagcatgcttcgagactgtggtaatcaggctgtagaagaacgactacaaaatattgaggcccacttgcggttacagacaggtggtccagtgccaagagacatttatcagagaattaaaaaacttgaggataaaatccttgaattggaaggcatctctcctgaatattttcagtctgtaagcttttctggaaaaagaagaaaagttcaaccacctcaacagaactattcactggctgaacttgatgagaaaattagtgccctcaaacaagccctcctcagaaaatcaagagaagcagaatccatggcaacccaccaccttccatgaaaaactcctctcgtccttgtcattttacttttttgtatacatatgtgtaacttacactgttattaattcaacggatatatatttatcaatgtagacttctctgtgaagtcaaggtttattttcacatgagtccagcttgcagcaagtaatcttcaaatattccagtaagttttgaaataatgaatgcattgaaaatagcattgttggaatttattcccttctgttttaaaggaggtattttggaaattgaaaaacttaatttacaagtgctggtacatcttttttcttttgtggaccacaggaaggaagatttattttgatattgatactttaaaaggactttatatttgtaacattgatgttaaccagtttattagtttaaatcagtactttgcatataataagcattcaacaaaaatttattgactgaaatgaattttaaatgcatgtgtatgaacttgtttttcttaatctttaagatgtcagtattcatgtaaataaacaatagatccagctttaaa

SEQ ID NO: 202 - DNA, 2858 bp, Homo sapiens
  misc_feature: Incyte ID No: 3607580CB1
gaattcttgttttacaagccatggctctgtttcttaatgttttctataatcactcactttttttttgcttttgacaaacattcaaaatgctaatgattcaaggatgtcctcagctctgtatgtgttctaagagttctatgttttttctccacagaaggcataagaactaggagctgctgacatttcaatatgaagggcaactccacccttgccactactagcaaaaacattaccagcggtcttcacttcgggcttgtgaacatctctggcaacaatgagtctaccttgaactgttcacagaaaccatcagataagcatttagatgcaattcctattctttactacattatatttgtaattggatttctggtcaatattgtcgtggttacactgttttgttgtcaaaagggtcctaaaaaggtttctagcatatacatcttcaacctcgctgtggctgatttactccttttggctactcttcctctatgggcaacctattattcttatagatatgactggctctttggacctgtgatgtgcaaagtttttggttcttttcttaccctgaacatgtttgcaagcattttttttatcacctgcatgagtgttgataggtaccaatctgtcatctacccctttctgtctcaaagaagaaatccctggcaagcatcttatatagttccccttgtttggtgtatggcctgtttgtcctcattgccaacattttattttcgagacgtcagaaccattgaatacttaggagtgaatgcttgcattatggctttcccacctgagaaatatgcccaatggtcagctgggattgccttaatgaaaaatatccttggttttattatccctttaatattcatagcaacatgctattttggaattagaaaacacttactgaagacgaatagctatgggaagaacaggataacccgtgaccaagtcctgaagatggcagctgctgttgttctggccttcatcatttgctggcttcccttccatgttctgaccttcctggatgctctggcctggatgggtgtcattaatagctgcgaagttatagcagtcattgacctggcacttccttttgccatcctcttgggattcaccaacagctgcgttaatccgtttctgtattgttttgttggaaaccggttccaacagaagctccgcagtgtgtttagggttccaattacttggctccaagggaaaagagagagtatgtcttgccggaaaagcagttctcttagagaaatggagacctttgtgtcttaaacgtgagagcaaaatgcatgtaatcaacatggctacttgctttgaggctcaccagaattatttttaagtggttttaataaaataataaaatttcccctaatcttttctgaatcttctgaaaccaaatgtaactatgttttatcgtccagtgactttcaggaattgcccattgtttttctgatatgtttgtacaagattttcattggtgagacatatttacaacctagaagtaactggtgatatatctcaaattgtaattaataatagattgtgaataatgatttggggattcagatttctctttgaaacatgcttgtgtttcttagtggggttttatatccatttttatcaggatttcctcttgaaccagaaccagtctttcaactcattgcatcatttacaagacaacattgtaagagagatgagcacttctaagttgagtatattataatagattagtactggattattcaggctttaggcatatgcttctttaaaaacgctataaattatattcctcttgcatttcacttgagtggaggtttatagttaatctataactacatattgaatagggctaggaatatagattaaatcatactcctatgctttagcttatttttacagttatagaaagcaagatgtactataacatagaattgcaatctataatatttgtgtgttcactaaactctgaataagcactttttaaaaaactttctactcattttaatgattgtttaaaggtttctattttctctgatacttttttgaaatcagtaaacactgtgtattgttgtaaaatgtaaaggtcacttttcacatccttgactttttagatgtgctgctttgatatataggacattgatttgatttttattattaatgctttggttctgggttgtttcctaaaatatctgggtggcttaaaaaaaactctttaacttgtaataaacccttaactggcataggaaatggtatccagaatggaattttgctacatggggtctgggtgggggcaaagagacccagtcaattacatgtttggtaccaagaaaggaacctgtcagggcagtacaatgtgactttgaaaatatataccgtgggggtagttttaccctatatctataaacactgtttgttccagaatctgtatgattctatggagctattttaaaccaattgcaggtctagatacctccttctcagcactattaaagctcctaagttagaggagtgcctaaaactgagttacctaaagtttacttacattaaagtatgaatattaattttagaaatttgagactttattctgtaccagccctgtataataacaggttatctaggaccttcctctgaggtaggtctaaatactgatctctgaggcggaactaacgttttggggactcagcatctctgccaggttccaggattatagacagaagagtcctgtcataccactttctggaaaagtcctaatttcatgtaatccttttattttcaataaaaacaaatagctaaatgtataaccaactatgatgttatgttttcaataattttgtaaaggagcggatgag

SEQ ID NO: 203 - DNA, 2486 bp, Homo sapiens
  misc_feature: Incyte ID No: 991163CB1
gggcgggccgggccgagtaggcgcgagctaagcaggaggcggaggcggaggcggagggcgaggggcggggagcgccgcctggagcgcggcaggtcatattgaacattccagatacctatcattactcgatgctgttgataacagcaagatggctttgaactcagggtcaccacctgctattggaccttactatgaaaaccatggataccaaccggaaaacccctatcccgcacagcccactgtggtccccactgtctacgaggtgcatccggctcagtactacccgtcccccgtgccccagtacgccccgagggtcctgacgcaggcttccaaccccgtcgtctgcacgcagcccaaatccccatccgggacagtgtgcacctcaaagactaagaaagcactgtgcatcaccttgaccctggggaccttcctcgtgggagctgcgctggccgctggcctactctggaagttcatgggcagcaagtgctccaactctgggatagagtgcgactcctcaggtacctgcatcaacccctctaactggtgtgatggcgtgtcacactgccccggcggggaggacgagaatcggtgtgttcgcctctacggaccaaacttcatccttcaggtgtactcatctcagaggaagtcctggcaccctgtgtgccaagacgactggaacgagaactacgggcgggcggcctgcagggacatgggctataagaataatttttactctagccaaggaatagtggatgacagcggatccaccagctttatgaaactgaacacaagtgccggcaatgtcgatatctataaaaaactgtaccacagtgatgcctgttcttcaaaagcagtggtttctttacgctgtatagcctgcggggtcaacttgaactcaagccgccagagcaggattgtgggcggcgagagcgcgctcccgggggcctggccctggcaggtcagcctgcacgtccagaacgtccacgtgtgcggaggctccatcatcacccccgagtggaccgtgacagccgcccactgcgtggaaaaacctcttaacaatccatggcattggacggcatttgcggggattttgagacaatctttcatgttctatggagccggataccaagtagaaaaagtgatttctcatccaaattatgactccaagaccaagaacaatgacattgcgctgatgaagctgcagaagcctctgactttcaacgacctagtgaaaccagtgtgtctgcccaacccaggcatgatgctgcagccagaacagctctgctggatttccgggtggggggccaccgaggagaaagggaagacctcagaagtgctgaacgctgccaaggtgcttctcattgagacacagagatgcaacagcagatatgtctatgacaacctgatcacaccagccatgatctgtgccggcttcctgcaggggaacgtcgattcttgccagggtgacagtggagggcctctggtcacttcgaagaacaatatctggtggctgataggggatacaagctggggttctggctgtgccaaagcttacagaccaggagtgtacgggaatgtgatggtattcacggactggatttatcgacaaatgagggcagacggctaatccacatggtcttcgtccttgacgtcgttttacaagaaaacaatggggctggttttgcttccccgtgcatgatttactcttagagatgattcagaggtcacttcatttttattaaacagtgaacttgtctggctttggcactctctgccattctgtgcaggctgcagtggctcccctgcccagcctgctctccctaaccccttgtccgcaaggggtgatggccggctggttgtgggcactggcggtcaagtgtggaggagaggggtggaggctgccccattgagatcttcctgctgagtcctttccaggggccaattttggatgagcatggagctgtcacctctcagctgctggatgacttgagatgaaaaaggagagacatggaaagggagacagccaggtggcacctgcagcggctgccctctggggccacttggtagtgtccccagcctacctctccacaaggggattttgctgatgggttcttagagccttagcagccctggatggtggccagaaataaagggaccagcccttcatgggtggtgacgtggtagtcacttgtaaggggaacagaaacatttttgttcttatggggtgagaatatagacagtgcccttggtgcgagggaagcaattgaaaaggaacttgccctgagcactcctggtgcaggtctccacctgcacattgggtggggctcctgggagggagactcagccttcctcctcatcctccctgaccctgctcctagcaccctggagagtgcacatgccccttggtcctggcagggcgccaagtctggcaccatgttggcctcttcaggcctgctagtcactggaaattgaggtccatgggggaa

SEQ ID NO: 204 - DNA, 2430 bp, Homo sapiens
  misc_feature: Incyte ID No: 1309633.1
  unsure 2338: a, t, c, g, or other
tctgggcggtcggcttccactccttcaggcgtcggcagccactagtcgtggcgagaggggcggggtggccggggctggcgctccacttggcccccgctcccggcccgccccgccgccgcggccccccggatgagggtatatattcggagcgagcgcgggacgccgatgagtggccgcgcggaaggagctggagacggtcgtagctgcggtcgcgccgagaaaggtttacaggtacatacattacacccctatttctacaaagcttggctattagagcattatgaacattaatgacctcaaactcacgttgtccaaagctgggcaagagcacctactacgtttctggaatgagcttgaagaagcccaacaggtagaactttatgcagagctccaggccatgaactttgaggagctgaacttctttttccaaaaggccattgaaggttttaaccagtcttctcaccaaaagaatgtggatgcacgaatggaacctgtgcctcgagaggtattaggcagtgctacaagggatcaagatcagctccaggcctgggaaagtgaaggacttttccagatttctcagaataaagtagcagttcttcttctagctggtgggcaggggacaagactcggcgttgcatatcctaaggggatgtatgatgttggtttgccatcccgtaagacactttttcagattcaagcagagcgtatcctgaagctacagcaggttgctgaaaaatattatggcaacaaatgcattattccatggtatataatgaccagtggcagaacaatggaatctacaaaggagttcttcaccaagcacaagtactttggtttaaaaaaagagaatgtaatcttttttcagcaaggaatgctccccgccatgagttttgatgggaaaattattttggaagagaagaacaaagtttctatggctccagatgggaatggtggtctttatcgggcacttgcagcccagaatattgtggaggatatggagcaaagaggcatttggagcattcatgtctattgtgttgacaacatattagtaaaagtggcagacccacggttcattggattttgcattcagaaaggagcagactgtggagcaaaggtggtagagaaaacgaaccctacagaaccagttggagtggtttgccgagtggatggagtttaccaggtggtagaatatagtgagatttccctggcaacagctcaaaaacgaagctcagacggacgactgctgttcaatgcggggaacattgccaaccatttcttcactgtaccatttctgagagatgttgtcaatgtttatgaacctcagttgcagcaccatgtggctcaaaagaagattccttatgtggatacccaaggacagttaattaagccagacaaacccaatggaataaagatggaaaaatttgtctttgacatcttccagtttgcaaagaagtttgtggtatatgaagtattgcgagaagatgagttttccccactaaagaatgctgatagtcagaatgggaaagacaaccctactactgcaaggcatgctttgatgtcccttcatcattgctgggtcctcaatgcagggggccatttcatagatgaaaatggctctcgccttccagcaattccccgcttgaaggatgccaatgatgtaccaatccaatgtgaaatctctcctcttatctcctatgctggagaaggattagaaagttatgtggcagataaagaattccatgcacctctaatcatcgatgagaatggagttcatgagctggtgaaaaatggtatttgaaccagataccaagttttgtttgccacgataggaatagcttttatttttgatagaccaactgtgaacctacaagacgtcttggacaactgaagtttaaatatccacagggttttattttgcttgttgaactcttagagctattgcaaacttcccaagatccagatgactgaatttcagatagcatttttatgattcccaactcattgaaggtcttatttatataattttttccaagccaaggagaccattggccatccaggaaatttcgtacagctgaaatataggcaggatgttcaacatcagtttacttgcagctggaagcatttgtttttgaagttgtacatagtaataatatgtcattgtacatgttgaaaggtttctatggtactaaaagtttgttttattttatcaaacattaagcttttttaagaaaataattgggcagtgaaataaatgtatcttcttgtctctggagtgtcatttgtacttgaagaaattatttcattgagaaaatatgaaacttgggagaaactttaaganaatgcataaaaacaaattgatgcttcagtgaggttgcagagtcatagaacttctttcagtgaatatctaactttgggctttatcttcttatc

SEQ ID NO: 205 - DNA, 1904 bp, Homo sapiens
  misc_feature: Incyte ID No: 1384719.29
  unsure 1697, 1710, 1717, 1756-1757, 1771, 1775, 1777-1778, 1817, 1873,1876-1879, 1883: a, t, c, g, or other
ttaaggcccctcccgcgcccagctcagagtgctgcagccgctgccgccgattccggatctcattgccacgcgcccccgacgaccgcccgacgtgcattcccgattccttttggttccaagtccaatatggcaactctaaaggatcagctgatttataatcttctaaaggaagaacagaccccccagaataagattacagttgttggggttggtgctgttggcatggcctgtgccatcagtatcttaatgaaggacttggcagatgaacttgctcttgttgatgtcatcgaagacaaattgaagggagagatgatggatctccaacatggcagccttttccttagaacaccaaagattgtctctggcaaagactataatgtaactgcaaactccaagctggtcattatcacggctggggcacgtcagcaagagggagaaagccgtcttaatttggtccagcgtaacgtgaacatatttaaattcatcattcctaatgttgtaaaatacagcccgaactgcaagttgcttattgtttcaaatccagtggatatcttgacctacgtggcttggaagataagtggttttcccaaaaaccgtgttattggaagtggttgcaatctggattcagcccgattccgttacctgatgggggaaaggctgggagttcacccattaagctgtcatgggtgggtccttggggaacatggagattccagtgtgcctgtatggagtggaatgaatgttgctggtgtctctctgaagactctgcacccagatttagggactgataaagataaggaacagtggaaagaggttcacaagcaggtggttgagagtgcttatgaggtgatcaaactcaaaggctacacatcctgggctattggactctctgtagcagatttggcagagagtataatgaagaatcttaggcgggtgcacccagtttccaccatgattaagggtctttacggaataaaggatgatgtcttccttagtgttccttgcattttgggacagaatggaatctcagaccttgtgaaggtgactctgacttctgaggaagaggcccgtttgaagaagagtgcagatacactttgggggatccaaaaggagctgcaattttaaagtcttctgatgtcatatcatttcactgtctaggctacaacaggattctaggtggaggttgtgcatgttgtcctttttatctgatctgtgattaaagcagtaatattttaagatggactgggaaaaacatcaactcctgaagttagaaataagaatggtttgtaaaatccacagctatatcctgatgctggatggtattaatcttgtgtagtcttcaactggttagtgtgaaatagttctgccacctctgacgcaccactgccaatgctgtacgtactgcatttgccccttgagccaggtggatgtttaccgtgtgttatataacttcctggctccttcactgaacatgcctagtccaacattttttcccagtgagtcacatcctgggatccagtgtataaatccaatatcatgtcttgtgcataattcttccaaaggatcttattttgtgaactatatcagtagtgtacattaccatataatgtaaaaagatctacatacaaacaatgcaaccaactatccaagtgttataccaactaaaacccccaataaaccttgaacagttggttgcnttgtttgtatgtngatcttnttacattatatggtaatgtacactactgatatagttcanncaataagatccttnggangnnttatgcacaagacatgatatcagtagtgtacattaccanataatgtaaaaagatctacatacaaacaatgcaaccaactatccaagtgttatacnggnnnngagncccaataaaccttgaacagtg

SEQ ID NO: 206 - DNA, 1011 bp, Homo sapiens
  misc_feature: Incyte ID No: 178250.2
  unsure 590, 593, 963: a, t, c, g, or other
aaacaacataactgtagagcatcgatggcaaccctctctaaatgaggttgcagcaagcccaaaatgtttacaaataattcgtaatattcaaaagtaagtagaggttcagggagatctagaaaataatctgcgattgttctgaatacatctcgttcaaatccaacataagttggattattcatatcattgcttcttggccaatttgctaggcacttcatggcagataatacccagtgagggaggtcatctgatttgttttgtagtataactactccacgtttacttgtattggccatgttgtacattatatattggggaattacttgttttggatttatgacttcttctagggatggcacacctaaaatggtttgcaggtagatcagaataacatatctccaaacttcttcaacatcttcctggcttagttctctattatcaattgcattttcttgatcttcattgattatttcatgctttattttctcgccattttcctgagataaatgtaatccatgccttttaggagttctacgagataagtctcgtaatttaaaaatgctatctttatctttggaaaagttctctangtngttttttctcaattctggaaaccttcgtggtagagttttaagtggcgaagttgcaggaaatctgaagagctggttgttatcatcaacattttctgatccccacctccctttgatatcttcaattacatgattcttaagaaatttcctcaacagttggatagtctgttgccttgtaacttcaggaccaaaattgctattatttcttaataggtcataaagccaatccactgcttctcctgctgtgaaacaattgccatattttttaaagtgttgtctgtgttttcttagaggcattcctgctcgaaaagatgtggtaacttcattccacagcttggtggcccgataaggcccgggaggcacaccctgactntccataggtctgtcagcgcccggtggcgtccatggcggcgaaggcgac

SEQ ID NO: 207 - DNA, 7182 bp, Homo sapiens
  misc_feature: Incyte ID No: 1099945.13
cgcttttggagcctgtgaatgaaccctcctcctctccctcctccttcttctcgctgagtctcctcctcggctctgacggtacagtgatataatgatgatgggtgtcacaacccgcatttgaacttgcaggcgagctgccccgagcctttctggggaagaactccaggcgtgcggacgcaacagccgagaacattaggtgttgtggacaggagctgggaccaagatcttcggccagccccgcatcctcccgcatcttccagcaccgtcccgcaccctccgcatccttccccgggccaccacgcttcctatgtgacccgcctgggcaacgccgaacccagtcgcgcagcgctgcagtgaattttccccccaaactgcaataagccgccttccaaggccaagatgttcataaatataaagagcatcttatggatgtgttcaaccttaatagtaacccatgcgctacataaagtcaaagtgggaaaaagcccaccggtgaggggctccctctctggaaaagtcagcctaccttgtcatttttcaacgatgcctactttgccacccagttacaacaccagtgaatttctccgcatcaaatggtctaagattgaagtggacaaaaatggaaaagatttgaaagagactactgtccttgtggcccaaaatggaaatatcaagattggtcaggactacaaagggagagtgtctgtgcccacacatcccgaggctgtgggcgatgcctccctcactgtggtcaagctgctggcaagtgatgcgggtctttaccgctgtgacgtcatgtacgggattgaagacacacaagacacggtgtcactgactgtggatggggttgtgtttcactacagggcggcaaccagcaggtacacactgaattttgaggctgctcagaaggcttgtttggacgttggggcagtcatagcaactccagagcagctctttgctgcctatgaagatggatttgagcagtgtgacgcaggctggctggctgatcagactgtcagatatcccatccgggctcccagagtgggctgttatggagataagatgggaaaggcaggagtcaggacttatggattccgttctccccaggaaacttacgatgtgtattgttatgtggatcatctggatggtgatgtgttccacctcactgtccccagtaaattcaccttcgaggaggctgcaaaagagtgtgaaaaccaggatgccaggctggcaacagtgggggaactccaggcggcatggaggaacggctttgaccagtgcgattacgggtggctgtcggatgccagcgtgcgccaccctgtgactgtggccagggcccagtgtggaggtggtctacttggggtgagaaccctgtatcgtttgagaaccagacaggcttccctccccctgatagcagatttgatgcctactgctttaaacctaaagaggctacaaccatcgatttgagtatcctcgcagaaactgcatcacccagtttatccaaagaaccacaaatggtttctgatagaactacaccaatcatccctttagttgatgaattacctgtcattccaacagagttccctcccgtgggaaatattgtcagttttgaacagaaagccacagtccaacctcaggctatcacagatagtttagccaccaaattacccacacctactggcagtaccaagaagccctgggatatggatgactactcaccttctgcttcaggacctcttggaaagcttagacatatcagaaattaaggaagaagtgctccagagtacaactggcgtctctcattatgctacggattcatgggatggtgtcgtggaagataaacaaacacaagaatcggttacacagattgaacaaatagaagtgggtcctttggtaacatctatggaaatcttaaagcacattccttccaaggaattccctgtaactgaaacaccattggtaactgcaagaatgatcctggaatccaaaactgaaaagaaaatggtaagcactgtttctgaattggtaaccacaggtcactatggattcaccttgggagaagaggatgatgaagacagaacacttacagttggatctgatgagagcaccttgatctttgaccaaattcctgaagtcattacggtgtcaaagacttcagaagacaccatccacactcatttagaagacttggagtcagtctcagcatccacaactgtttcccctttaattatgcctgataataatggatcatccatggatgactgggaagagagacaaactagtggtaggataacggaagagtttcttggcaaatatctgtctactacaccttttccatcacagcatcgtacagaaatagaattgtttcctattctggtgataaaatattagtagagggaatttccacagttatttatccttctctacaaacagaaatgacacatagaagagaaagaacagaaacactaataccagagatgagaacagatacttatacagatgaaatacaagaagagatcactaaaagtccatttatgggaaaaacagaagaagaagtcttctctgggatgaaactctctacatctctctcagagccaattcatgttacagagtcttctgtggaaatgaccaagtcttttgatttcccaacattgataacaaagttaagtgcagagccaacagaagtaagagatatggaggaagactttacagcaactccaggtactacaaaatatgatgaaaatattacaacagtgcttttggcccatggtactttaagtgttgaagcagccactgtatcaaaatggtcatgggatgaagataatacaacatccaagcctttagagtctacagaaccttcagcctcttcaaaattgccccctgccttactcacaactgtggggatgaatggaaaggataaagacatcccaagtttcactgaagatggagcagatgaatttactcttattccagatagtactcaaaagcagttagaggaggttactgatgaagacatagcagcccatggaaaattcacaattagatttcagccaactacatcaactggtattgcagaaaagtcaactttgagagattctacaactgaagaaaaagttccacctatcacaagcactgaaggccaagtttatgcaaccatggaaggaagtgctttgggtgaagtagaagatgtggacctctctaagccagtatctactgttccccaatttgcacacacttcagaggtggaaggattagcatttgttagttatagtagcacccaagagcctactacttatgtagactcttcccataccattcctctttctgtaattcccaagacagactggggagtgttagtaccttctgttccatcagaagatgaagttctaggtgaaccctctcaagacatacttgtcattgatcagactcgccttgaagcgactatttctccagaaactatgagaacaacaaaaatcacagagggaacaactcaggaagaattcccttggaaagaacagactgcagagaaaccagttcctgctctcagttctacagcttggactcccaaggaggcagtaacaccactggatgaacaagagggcgatggatcagcatatacagtctctgaagatgaattgttgacaggttctgagagggtcccagttttagaaacaactccagttggaaaaattgatcacagtgtgtcttatccaccaggtgctgtaactgagcacaaagtgaaaacagatgaagtggtaacactaacaccacgcattgggccaaaagtatctttaagtccagggcctgaacaaaaatatgaaacagaaggtagtagtacaacaggatttacatcatctttgagtccttttagtacccacattacccagcttatggaagaaaccactactgagaaaacatccctagaggatattgatttaggctcaggattatttgaaaagcccaaagccacagaactcatagaattttcaacaatcaaagtcacagttccaagtgatattaccactgccttcagttcagtagacagacttcacacaacttcagcattcaagccatcttccgcgatcactaagaaaccacctctcatcgacagggaacctggtgaagaaacaaccagtgacatggtaatcattggagaatcaacatctcatgttcctcccactacccttgaagatattgtagccaaggaaacagaaaccgatattgatagagagtatttcacgacttcaagtcctcctgctacacagccaacaagaccacccactgtggaagacaaagaggcctttggacctcaggcgctttctacgccacagcccccagcaagcacaaaatttcaccctgacattaatgtttatattattgaggtcagagaaaataagacaggacctgatcgctgcaaaatgaacccgtgccttaacggaggcacctgttatcctactgaaacttcctacgtatgcacctgtgtgccaggatacagcggagaccagtgtgaacttgattttgatgaatgtcactctaatccctgtcgtaatggagccacttgtgttgatggttttaacacattcaggtgcctctgccttccaagttatgttggtgcactttgtgagcaagataccgagacatgtgactatggctggcacaaattccaagggcagtgctacaaatactttgcccatcgacgcacatgggatgcagctgaacgggaatgccgtctgcagggtgcccatctcacaagcatcctgtctcacgaagaacaaatgtttgttaatcgtgtgggccatgattatcagtggataggcctcaatgacaagatgtttgagcatgacttccgttggactgatggcagcacactgcaatacgagaattggagacccaaccagccagacagcttcttttctgctggagaagactgtgttgtaatcatttggcatgagaatggccagtggaatgatgttccctgcaattaccatctcacctatacgtgcaagaaaggaacagttgcttgcggccagccccctgttgtagaaaatgccaagacctttggaaagatgaaacctcgttatgaaatcaactccctgattagataccactgcaaagatggtttcattcaacgtcaccttccaactatctggtgcttaggaaatggaagatgggctatacctaaaattacctgcatgaacccatctgcataccaaaggacttattctatgaaatactttaaaaattcctcatcagcaaaggacaattcaataaatacatccaaacatgatcatcgttggagccggaggtggcaggagtcgaggcgctgatccctaaaatggcgaacatgtgttttcatcatttcagccaaagtcctaacttcctgtgcctttcctatcacctcgagaagtaattatcagttggtttggatttttggaccaccgttcagtcattttgggttgccgtgctcccaaaacattttaaatgaaagtattggcattcaaaaagacagcagacaaaatgaaagaaaatgagagcagaaagtaagcatttccagcctatctaatttctttagttttctatttgcctccagtgcagtccatttcctaatgtataccagcctactgtactatttaaaatgctcaatttcagcaccgatggccatgtaaataagatgatttaatgttgattttaatcctgtatataaaataaaaagtcacaatgagtttgggcatatttaatgatgattatggagccttagaggtctttaatcattggttcggctgcttttatgtagtttaggctggaaatggtttcacttgctctttgactgtcagcaagactgaagatggcttttcctggacagctagaaaacacaaaatcttgtaggtcattgcacctatctcagccataggtgcagtttgcttctacatgatgctaaaggctgcgaatgggatcctgatggaactaaggactccaatgtcgaactcttctttgctgcattcctttttcttcacttacaagaaaggcctgaatggaggacttttctgtaaccaggaacattttttaggggtcaaagtgctaataattaactcaaccaggtctactttttaatggctttcataacactaactcataaggttaccgatcaatgcatttcatacggatatagacctagggctctggagggtgggggattgttaaaacacatgcaaaaataataataaaaaaagaaattttgtatatataaccattttaatcttttataaagttttgaatgttcatgtatgaatgctgcagctgtgaagcatacataaataaatgaagtaagccatactgatttaatttattggatgttattttccctaagacctgaaaatgaacatagtatgctagttatttttcagtgttagccttttactttcctcacacaatttggaatcatataatataggtactttgtccctgattaaataatgtgacggatagaatgcatcaagtgtttattatgaaaagagtggaaaagtatatagcttttagcaaaaggtgtttgcccattctaagaaatgagcgaatatatagaaatagtgtgggcatttcttcctgttaggtggagtgtatgtgttgacatttctccccatctcttcccactctgttttctccccattatttgaataaagtgactgctgaagatgactttgaatccttatccacttaatttaatgtttaaagaaaaacctgtaatggaaagtaagactccttccctaatttcagtttagagcaacttgaagaagagtagacaaaaaataaaatgcacatagaaaaagagaaaaagggcacaaagggattggcccaatattgattcttttttataaaacctcctttggcttagaaggaatgactctagctacaataatacacagaatgtttaagcaggttcccttggttgttgcattaaatgtaatccacctttaggtattttagagcacagaacaacactgtgttgatctagtaggtttctatttttcctttctctttacaatgcacataatactttcctgtatttatatcataacgtgtatagtgtaaaatgtgaatgactttttttgtgaatgaaaatctaaaatctttgtaactttttatatctgcttttgtttcaccaaagaaacctaaaatccttctttt

SEQ ID NO: 208 - DNA, 3358 bp, Homo sapiens
  misc_feature: Incyte ID No: 2172334CB1
  unsure 3147, 3182-3184, 3219, 3239, 3262, 3349: a, t, c, g, or other
gggtcgaggcggcgcggcctgagtgaaacccaatggaaaaagcatgacatttagaagtagaagacttagcttcaaatccctactccttcacttactaattttgtgatttggaaatatccgcgcaagatgttgacgttgcagacttgggtagtgcaagccttgtttattttcctcaccactgaatctacaggtgaacttctagatccatgtggttatatcagtcctgaatctccagttgtacaacttcattctaatttcactgcagtttgtgtgctaaaggaaaaatgtatggattattttcatgtaaatgctaattacattgtctggaaaacaaaccattttactattcctaaggagcaatatactatcataaacagaacagcatccagtgtcacctttacagatatagcttcattaaatattcagctcacttgcaacattcttacattcggacagcttgaacagaatgtttatggaatcacaataatttcaggcttgcctccagaaaaacctaaaaatttgagttgcattgtgaacgaggggaagaaaatgaggtgtgagtgggatggtggaagggaaacacacttggagacaaacttcactttaaaatctgaatgggcaacacacaagtttgctgattgcaaagcaaaacgtgacacccccacctcatgcactgttgattattctactgtgtattttgtcaacattgaagtctgggtagaagcagagaatgcccttgggaaggttacatcagatcatatcaattttgatcctgtatataaagtgaagcccaatccgccacataatttatcagtgatcaactcagaggaactgtctagtatcttaaaattgacatggaccaacccaagtattaagagtgttataatactaaaatataacattcaatataggaccaaagatgcctcaacttggagccagattcctcctgaagacacagcatccacccgatcttcattcactgtccaagaccttaaaccttttacagaatatgtgtttaggattcgctgtatgaaggaagatggtaagggatactggagtgactggagtgaagaagcaagtgggatcacctatgaagatagaccatctaaagcaccaagtttctggtataaaatagatccatcccatactcaaggctacagaactgtacaactcgtgtggaagacattgcctccttttgaagccaatggaaaaatcttggattatgaagtgactctcacaagatggaaatcacatttacaaaattacacagttaatgccacaaaactgacagtaaatctcacaaatgatcgctatctagcaaccctaacagtaagaaatcttgttggcaaatcagatgcagctgttttaactatccctgcctgtgactttcaagctactcaccctgtaatggatcttaaagcattccccaaagataacatgctttgggtggaatggactactccaagggaatctgtaaagaaatatatacttgagtggtgtgtgttatcagataaagcaccctgtatcacagactggcaacaagaagatggtaccgtgcatcgcacctatttaagagggaacttagcagagagcaaatgctatttgataacagttactccagtatatgctgatggaccaggaagccctgaatccataaaggcataccttaaacaagctccaccttccaaaggacctactgttcggacaaaaaaagtagggaaaaacgaagctgtcttagagtgggaccaacttcctgttgatgttcagaatggatttatcagaaattatactatattttatagaaccatcattggaaatgaaactgctgtgaatgtggattcttcccacacagaatatacattgtcctctttgactagtgacacattgtacatggtacgaatggcagcatacacagatgaaggtgggaaggatggtccagaattcacttttactaccccaaagtttgctcaaggagaaattgaagccatagtcgtgcctgtttgcttagcattcctattgacaactcttctgggagtgctgttctgctttaataagcgagacctaattaaaaaacacatctggcctaatgttccagatccttcaaagagtcatattgcccagtggtcacctcacactcctccaaggcacaattttaattcaaaagatcaaatgtattcagatggcaatttcactgatgtaagtgttgtggaaatagaagcaaatgacaaaaagccttttccagaagatctgaaatcattggacctgttcaaaaaggaaaaaattaatactgaaggacacagcagtggtattggggggtcttcatgcatgtcatcttctaggccaagcatttctagcagtgatgaaaatgaatcttcacaaaacacttcgagcactgtccagtattctaccgtggtacacagtggctacagacaccaagttccgtcagtccaagtcttctcaagatccgagtctacccagcccttgttagattcagaggagcggccagaagatctacaattagtagatcatgtagatggcggtgatggtattttgcccaggcaacagtacttcaaacagaactgcagtcagcatgaatccagtccagatatttcacattttgaaaggtcaaagcaagtttcatcagtcaatgaggaagattttgttagacttaaacagcagatttcagatcatatttcacaatcctgtggatctgggcaaatgaaaatgtttcaggaagtttctgcagcagatgcttttggtccaggtactgagggacaagtagaaagatttgaaacagttggcatggaggctgcgactgatgaaggcatgcctaaaagttacttaccacagactgtacggcaaggcggctacatgcctcagtgaaggactagtagttcctgctacaacttcagcagtacctataaagtaaagctaaaatgattttatctgtgaattcagattttaaaaagtcttcactctctgaagatgatcatttgcccttaaggacaaaaatgaactgaagtttcacatgagctatttccattccagaatatctgggattctactttaagcactacataaactgactttatcctcagactagctgaatgattttgtgctgtttcaggatgtttggcactgaagganaaacagaaagcttatcttgaaatttataaaaactnnntttgtttttgctacatagggaaacagaaggttttntggaattattaaggcagtgntatgacttaggtgaggcacagtnattacggatttttgattagggataggtcttcgagtaggcttagggagacagtttatataaaagaggggccaggtgtaggaccctcantagcttctg

SEQ ID NO: 209 - DNA, 7819 bp, Homo sapiens
  misc_feature: Incyte ID No: 253946.17
gcgccccgccccgccgcgggactggggtggcgcgctacctctgcggagaaggatctgacagtgttccggagccggggcgagcagccaaaaggcccgcggagtcgcgctgggccgccccggcgcagctgaaccgggggccgcgcctgccaggccgacgggtctggcccagcctggcgccaaggggttcgtgcgctgtggagacgcggagggtcgaggcggcgcggcctgagtgaaacccaatggaaaaagcatgacatttagaagtagaagacttagcttcaaatccctactccttcacttactaattttgtgatttggaaatatccgcgcaagatgttgacgttgcagacttggctagtgcaagccttgtttattttcctcaccactgaatctacaggtgaacttctagatccatgtggttatatcagtcctgaatctccagttgtacaacttcattctaatttcactgcagtttgtgtgctaaaggaaaaatgtatggattattttcatgtaaatgctaattacattgtctggaaaacaaaccattttactattcctaaggagcaatatactatcataaacagaacagcatccagtgtcacctttacagatatagcttcattaaatattcagctcacttgcaacattcttacattcggacagcttgaacagaatgtttatggaatcacaataatttcaggcttgcctccagaaaaacctaaaaatttgagttgcattgtgaacgaggggaagaaaatgaggtgtgagtgggatggtggaagggaaacacacttggagacaaacttcactttaaaatctgaatgggcaacacacaagtttgctgattgcaaagcaaaacgtgacacccccacctcatgcactgttgattattctactgtgtattttgtcaacattgaagtctgggtagaagcagagaatgcccttgggaaggttacatcagatcatatcaattttgatcctgtatataaagtgaagcccaatccgccacataatttatcagtgatcaactcagaggaactgtctagtatcttaaaattgacatggaccaacccaagtattaagagtgttataatactaaaatataacattcaatataggaccaaagatgcctcaacttggagccagattcctcctgaagacacagcatccacccgatcttcattcactgtccaagaccttaaaccttttacagaatatgtgtttaggattcgctgtatgaaggaagatggtaagggatactggagtgactggagtgaagaagcaagtgggatcacctatgaagatagaccatctaaagcaccaagtttctggtataaaatagatccatcccatactcaaggctacagaactgtacaactcgtgtggaagacattgcctccttttgaagccaatggaaaaatcttggattatgaagtgactctcacaagatggaaatcacatttacaaaattacacagttaatgccacaaaactgacagtaaatctcacaaatgatcgctatctagcaaccctaacagtaagaaatcttgttggcaaatcagatgcagctgttttaactatccctgcctgtgactttcaagctactcaccctgtaatggatcttaaagcattccccaaagataacatgctttgggtggaatggactactccaagggaatctgtaaagaaatatatacttgagtggtgtgtgttatcagataaagcaccctgtatcacagactggcaacaagaagatggtaccgtgcatcgcacctatttaagagggaacttagcagagagcaaatgctatttgataacagttactccagtatatgctgatggaccaggaagccctgaatccataaaggcataccttaaacaagctccaccttccaaaggacctactgttcggacaaaaaaagtagggaaaaacgaagctgtcttagagtgggaccaacttcctgttgatgttcagaatggatttatcagaaattatactatattttatagaaccatcattggaaatgaaactgctgtgaatgtggattcttcccacacagaatatacattgtcctctttgactagtgacacattgtacatggtacgaatggcagcatacacagatgaaggtgggaaggatggtccagaattcacttttactaccccaaagtttgctcaaggagaaattgaagccatagtcgtgcctgtttgcttagcattcctattgacaactcttctgggagtgctgttctgctttaataagcgagacctaattaaaaaacacatctggcctaatgttccagatccttcaaagagtcatattgcccagtggtcacctcacactcctccaaggcacaattttaattcaaaagatcaaatgtattcagatggcaatttcactgatgtaagtgttgtggaaatagaagcaaatgacaaaaagccttttccagaagatctgaaatcattggacctgttcaaaaaggaaaaaattaatactgaaggacacagcagtggtattggggggtcttcatgcatgtcatcttctaggccaagcatttctagcagtgatgaaaatgaatcttcacaaaacacttcgagcactgtccagtattctaccgtggtacacagtggctacagacaccaagttccgtcagtccaagtcttctcaagatccgagtctacccagcccttgttagattcagaggagcggccagaagatctacaattagtagatcatgtagatggcggtgatggtattttgcccaggcaacagtacttcaaacagaactgcagtcagcatgaatccagtccagatatttcacattttgaaaggtcaaagcaagtttcatcagtcaatgaggaagattttgttagacttaaacagcagatttcagatcatatttcacaatcctgtggatctgggcaaatgaaaatgtttcaggaagtttctgcagcagatgcttttggtccaggtactgagggacaagtagaaagatttgaaacagttggcatggaggctgcgactgatgaaggcatgcctaaaagttacttaccacagactgtacggcaaggcggctacatgcctcagtgaaggactagtagttcctgctacaacttcagcagtacctataaagtaaagctaaaatgattttatctgtgaattcagattttaaaaagtcttcactctctgaagatgatcatttgcccttaaggacaaaaatgaactgaagtttcacatgagctatttccattccagaatatctgggattctactttaagcactacataaactgactttatcctcagactagctgaatgattttgtgctgtttcaggatgtttgcactgaagaaaaacagaaagcttatctgaaatttataaaactttttgttttgctacatagaaaacagaaggtatttgaataataagcagtgatatgcttagtgagcacagctatactgattttgattagaatagtcatcagagtggcttagggacagttaatataaaagaggagcaaggtgtagaccatcatctacttctgctaaaataacttaaaaagaggtccataggccataactacatgagcccagcttttgtaatctgacaaaaaaatgaggagcagcttcgtgtatatcagtgtacacggtattccttaggtcccttccattggtagtgatgctgcgagttattactggagaaaaggaattctagagctttaacttggcagattaaaagtactcattttttattcatcaataattagtaatctcactagttttcaaaaatttgcatattattgacaacctctttgaagatgcatttcacaaactcaacagagtgccatgataagagctagggatcccccaaactatctcaagcatctaaaaaattgccatttttaaaggcttaaattgtagtagtaaaggggaaaacaggaagtagtagtaaaggggaaaaaaaaccaataaagcatctaaaaaattggcatgttaaaaggcttaaattgctaatgtgtgtatatatatatatatatatacacacatatatacacacacatatcattgacttttcttaagacttcagagtactgggtagatgaacactttatacagtatatatcttcagcttaaatttgttttgagtattttttttatttttaaataagtaggcaaagatttaaatttttttatttttagtaaatgtttgaggcacactaagacaacttgggcaatatttgccaaaacaaaacagaaccccaaaaaatgtacatcttgttcttagcaaatatcattattgtagagacacttaataaagagatggtattttaatgtctgcagttctgaggtagggtggaacttagttctacattgtgatttaggaatttttaaaaccttttttcttcaagggagaagtgacccaggcctcgagtttagtgctaaagccgctagtgtacttatgctgtcccctaaccaccacgtgcgatatggaagcagatgctaaatataggggttttcttagaaagtaagaggaaattagcaagcgttattagtgattgactactgctatcaagtgaattcaaaggaaacaggtttttatgccatatttaagttacagaaaccaggcatgcttagaatagtttctagaggttattggagaatagaaagctaagaaaacttggtatacatttacaatggaaatataattacactttttactctcagaatattgttcacattagacttcctgtttatcttttatattcttgcatttatataatgcctcatcctttcaaagttctttcacatattatatgatcttctttatgaaaaaaatagatgtttcattctgatatattcagtttcccactttaggcaaaagtagattaatagaatgacgaattcaaagtagatgaggaaaatcaggcacagagaagtaaaggtagggatagacccaaatttacacaacaagataatgacatctccagcttttaagttgatcatcaaaggctgggctggatttgtcttgctgtatgtgtcaggaaatttatacctattacattttccattttctcaaaatttaagtcacatgactaatatttagctgcaactttcctcataacaaatagtgtcatgaagaatgttgtagtgtgaagtttgtacatttcagggtcagatatacaatatgaactcttaatctacaggaatgagaatggaggatcattgaaggccatgatataaacaaatttgcatgttgaagcctgtataaaacatggtacagtgagtgaatatacccccatccccaagaacactttatacatattaaatggatatatgattactgtgcaaaaattcattctggaaatgaacatatatttgagcactaatatgtaatgtacacctgccctaaggagaaaataaattataaaactttttacattcaaaattactttcccaagcatgtcttagaataatctatgtgttgatgcatgtaaattgtactttaggtaggcaaagaaatctggttatttatgtaaaaactagtctaataaagttagttagtggctttatcactttaaatctttagtgtccaaaagtggtgtttaaagtaatagcacatcagaaaaccttgtctggacaaaactagttcactcactgcttctgcacctgcagttgctccctttagggttataaaataatgacccaaatgttacatgtgttgatattataacttgtcagttactgatgtctgtggtatcctaccctcatctctgaaagggataatactgaataattattagaaaactataaaacttcacactttgtaccattaaaacctaaaattttaatcttgtccttttttactatggatcagtcggcactcgggaacagcagcaaggaaaaaaagcaaatttcattcacatgttctgtgttcatacctcttctctacctaattgttcatttaaatttcagccttattccttgataagggattttaccacatgaagtcatccagtgaccctagctcttattgtgaagttagtggagtatacttagaaatgttacaactttaaaatgttacaaaacattcattaaagctcatatttaaagtagagcatctagtttgagaaatagaaatcaattattaaagatgtcttttttctacccatttaactagttaaaaccatgacatgtaaatgtagaagtagaataatcatagaattccctaaaatatttctgtttactaacatatattgaccaagtacatcaagcaggagagatcttccttcattctgttatagtccacatcattctaattttgctcagttgttattaagagcatattcctaaaccatacacttttgtttcaataaagttttattttgttgagatgaataaaataacaaagttataagctgcataagacaaaagttcaattgttcaaaaaaaatttactgggatagctttctattacaggtattgttagattatattgtgctgataagattactttctaaaaaatttgtacttttctgtaaattaaaagaatatggagtcataaaatggcaagtgttttaggattagcctaaaattggacattgtcattgatttcaaagaaggtatgaactagcagtcttacagcctaattcttctttggactggtccttggcagcagttccttttcagactcgataaacagaattcagatgatgtaagtcaaaacaaaactttacaaagccaagcgtattatcttttgcattaacctatttttttccatcatacatgctactagtatgtgcattagcatgatattctcatatacattgcattaaaaattaaaaggtggcagctcagggtgagctcttctgttgctcatttgttcctaaatttttaagggctttttctcagtcaatagtttgtacaaactggttagtttaacttcattacccatttcattaaagttgatgggtcgtgtgatgagatgcatttaaggccgatagtgatagatgttttttttatttcttgaacacaggctttgtctgaatgatgttcttttatctcttgaacacaagctttgaatgataactacaggttttaagtgctgttacattaataccataatgtgatgtgttagaaacaaagggatatttcaaaggtagatatttgaaaattctctagtctcaatatgtatgtgtattgaatatactctaaaaataaatgtgcaatttgctagtaggacaatgcagtgactgactagcattaggtatgtttcttttatatcctagctatgtcccactttcttctaagtgcaatcctttcatgttcacttgctgttttaccccatctactctaacttcatttggaaggcttgtctagagtatagcatgtatttttacctttgcagtgaattgcatgtgctaattgtaaccacagctatttttatgttgacataactccaaatgttatattaaatgttctattatatattagctctaatcccttaagtaaattttaagaaataaatacttgttcaaattttttttctgtatgtggttactatcatctgactatgcatatttgtaacagcatttatcattagtggtgttagctaaataagcatcttagtgtaaatgagatgcttcgtgtgggttttgtgacattttaaatgacataatggaatgtgatttaaaagaaaaccagtacactatcttggtcttaataacatagaatggagatggcaaatttatccactagttttccagatttactatttaatagctgaggtctgaaatcgtagcatcctccctcctagtggacatt

SEQ ID NO: 210 - DNA, 2310 bp, Homo sapiens
  misc_feature: Incyte ID No: 008513.49
  unsure 2307: a, t, c, g, or other
cttccctctctcctccagcctctcacactctcctcagctctctcatctcctggaaccatggccagcacatccaccaccatcaggagccacagcagcagccgccggggtttcagtgccaacttcagccaggctccctggggtcagccgctctggcttcagcagcgtctccgtgtcccgctccaggggcagtggtggcctgggtggtgcatgtggaggagctggctttggcagccgcagtctgtatggcctggggggctccaagaggatctccattggagggggcagctgtgccatcagtggcggctatggcagcagagccggaggcagctatggctttggtggcgccgggagtggatttggtttcggtggtggagccggcattggctttggtctgggtggtggagccggccttgctggtggctttgggggccctggcttccctgtgtgcccccctggaggcatccaagaggtcaccgtcaaccagagtctcctgactcccctcaacctgcaaatcgatcccaccatccagcgggtgcgggccgaggagcgtgagcagatcaagaccctcaacaacaagtttgcctccttcatcgacaaggtgcggttcctggagcagcagaacaaggttctggaaacaaagtggaccctgctgcaggagcagggcaccaagactgtgaggcagaacctggagccgttgttcgagcagtacatcaacaacctcaggaggcagctggacagcattgtcggggaacggggccgcctggactcagagctcagaggcatgcaggacctggtggaggacttcaagaacaaatatgaggatgaaatcaacaagcgcacagcagcagagaatgaatttgtgactctgaagaaggatgtggatgctgcctacatgaacaaggttgaactgcaagccaaggcagacactctcacagacgagatcaacttcctgagagccttgtatgatgcagagctgtcccagatgcagacccacatctcagacacatctgtggtgctgtccatggacaacaaccgcaacctggacctggacagcatcatcgctgaggtcaaggcccaatatgaggagattgctcagagaagccgggctgaggctgagtcctggtaccagaccaagtacgaggagctgcaggtcacagcaggcagacatggggacgacctgcgcaacaccaagcaggagattgctgagatcaaccgcatgatccagaggctgagatctgagatcgaccacgtcaagaagcagtgcgccaacctgcaggccgccattgctgatgctgagcagcgtggggagatggccctcaaggatgccaagaacaagctggaagggctggaggatgccctgcagaaggccaagcaggacctggcccggctgctgaaggagtaccaggagctgatgaatgtcaagctggccctggacgtggagatcgccacctaccgcaagctgctggagggtgaggagtgcaggctgaatggcgaaggcgttggacaagtcaacatctctgtggtgcagtccaccgtctccagtggctatggcggtgccagtggtgtcggcagtggcttaggcctgggtggaggaagcagctactcctatggcagtggtcttggcgttggaggtggcttcagttccagcagtggcagagccattgggggtggcctcagctctgttggaggcggcagttccaccatcaagtacaccaccacctcctcctccagcaggaagagctataagcactaaagtgcgtctgctagctctcggtcccacagtcctcaggcccctctctggctgcagagccctctcctcaggttgcctttcctctcctggcctccagtctcccctgctgtcccaggtagagctgggtatggatgcttagtgccctcacttcttctctctctctctataccatctgagcacccattgctcaccatcagatcaacctctgattttacatcatgatgtaatcaccactggagcttcactgttactaaattattaatttcttgcctccagtgttctatctctgaggctgagcattataagaaaatgacctctgctccttttcattgcagaaaattgccaggggcttatttcagaacaacttccacttactttccactggctctcaaactctctaacttataagtgttgtgaacccccacccaggcagtatccatgaaagcacaagtgactagtcctatgatgtacaaagcctgtatctctgtgatgatttctgtgctcttcgctgtttgcaattgctaaataaagcagatttataatacaaaaaaaaaaanggg

SEQ ID NO: 211 - DNA, 3591 bp, Homo sapiens
  misc_feature: Incyte ID No: 1092257.2
cgctcccacccgcccgtggcccgcgcccatggccgcgcgcgctccacacaactcaccggagtccgcgccctgcgccgccgaccagttcgcagctccgcgccacggcagccagtctcacctggcggcaccgcccgcccaccgccccggccacagcccctgcgcccacggcagcactcgaggcgaccgcgacagtggtgggggacgctgctgagtggaagagagcgcagcccggccaccggacctacttactcgccttgctgattgtctatttttgcgtttacaacttttctaagaacttttgtatacaaaggaactttttaaaaaagacgcttccaagttatatttaatccaaagaagaaggatctcggccaatttggggttttgggttttggcttcgtttcttctcttcgttgactttggggttcaggtgccccagctgcttcgggctgccgaggaccttctgggcccccacattaatgaggcagccacctggcgagtctgacatggctgtcagcgacgcgctgctcccatctttctccacgttcgcgtctggcccggcgggaagggagaagacactgcgtcaagcaggtgccccgaataaccgctggcgggaggagctctcccacatgaagcgacttcccccagtgcttcccggccgcccctatgacctggcggcggcgaccgtggccacagacctggagagcggcggagccggtgcggcttgcggcggtagcaacctggcgcccctacctcggagagagaccgaggagttcaacgatctcctggacctggactttattctctccaattcgctgacccatcctccggagtcagtggccgccaccgtgtcctcgtcagcgtcagcctcctcttcgtcgtcgccgtcgagcagcggccctgccagcgcgccctccacctgcagcttcacctatccgatccgggccgggaacgacccgggcgtggcgccgggcggcacgggcggaggcctcctctatggcagggagtccgctccccctccgacggctcccttcaacctggcggacatcaacgacgtgagcccctcgggcggcttcgtggccgagctcctgcggccagaattggacccggtgtacattccgccgcagcagccgcagccgccaggtggcgggctgatgggcaagttcgtgctgaaggcgtcgctgagcgcccctggcagcgagtacggcagcccgtcggtcatcagcgtcagcaaaggcagccctgacggcagccacccggtggtggtggcgccctacaacggcgggccgccgcgcacgtgccccaagatcaagcaggaggcggtctcttcgtgcacccacttgggcgctggaccccctctcagcaatggccaccggccggctgcacacgacttccccctggggcggcagctccccagcaggactaccccgaccctgggtcttgaggaagtgctgagcagcagggactgtcaccctgccctgccgcttcctcccggcttccatccccacccggggcccaattacccatccttcctgcccgatcagatgcagccgcaagtcccgccgctccattaccaagagctcatgccacccggttcctgcatgccagaggagcccaagccaaagaggggaagacgatcgtggccccggaaaaggaccgccacccacacttgtgattacgcgggctgcggcaaaacctacacaaagagttcccatctcaaggcacacctgcgaacccacacaggtgagaaaccttaccactgtgactgggacggctgtggatggaaattcgcccgctcagatgaactgaccaggcactaccgtaaacacacggggcaccgcccgttccagtgccaaaaatgcgaccgagcattttccaggtcggaccacctcgccttacacatgaagaggcatttttaaatcccagacagtggatatgacccacactgccagaagagaattcagtattttttacttttcacactgtcttcccgatgagggaaggagcccagccagaaagcactacaatcatggtcaagttcccaactgagtcatcttgtgagtggataatcaggaaaaatgaggaatccaaaagacaaaaatcaaagaacagatggggtctgtgactggatcttctatcattccaattctaaatccgacttgaatattcctggacttacaaaatgccaagggggtgactggaagttgtggatatcagggtataaattatatccgtgagttgggggagggaagaccagaattcccttgaattgtgtattgatgcaatataagcataaaagatcaccttgtattctctttaccttctaaaagccattattatgatgttagaagaagaggaagaaattcaggtacagaaaacatgtttaaatagcctaaatgatggtgcttggtgagtcttggttctaaaggtaccaaacaaggaagccaaagttttcaaactgctgcatactttgacaaggaaaatctatatttgtcttccgatcaacatttatgacctaagtcaggtaatatacctggtttacttctttagcatttttatgcagacagtctgttatgcactgtggtttcagatgtgcaataatttgtacaatggtttattcccaagtatgccttaagcagaacaaatgtgtttttctatatagttccttgccttaataaatatgtaatataaatttaagcaaacgtctattttgtatatttgtaaactacaaagtaaaatgaacattttgtggagtttgtattttgcatactcaaggtgagaattaagttttaaataaactacatacattgcaaggcataaaccttaactgtacatgttagacaaataaatagacccatataaacttcaccccttttcgaagcaacactttcatcaccctcagaaaattcacttgtctttggtcctttttctcatgcagagattatcttgttgattttttttcaccataggattattttgccctcactttcccactctttccttaagtttaaattctgagggccacagctcccatatccatccaatatcactttttggaatgatgcttctataagcttctttcttaagaggccttgagtatcatgagaaaagatatctggctggatggctactgtctctgcactcttcacattccagggctctttcctttgctccaaaaaggtgatcaggtccggcttagagacagcgagacccagagagaccaggtttccgtagttctctaacatcacatccccatataaaagcttctgatctgagtccaggtgttcccactcctcccgagagaattctatggccacatccctgaatgtcaacagtccctcaactgaagggacaggagcaggtgcccagccagtcagatgttcagtgacctcaaagagggttcccgccgcttccgaccgcccctctccctcttctggggacccccgacctggcacattcaccatttcccagcttccgggatgtcctggcgtctgagctacggatctcccggtgcctgccggtcacagagtaacagaggttctgtctattctcagaacgcgaagccgccttggcctcccagatggaaggactggg

SEQ ID NO: 212 - DNA, 1097 bp, Homo sapiens
  misc_feature: Incyte ID No: 4349106CB1
gcggcttccgggatttggcggtggcctttgttggctgcagtaagagctcagtctcttcaccaggggctcccagtccttccatctgggaggccaaggcggcttcgcgttctgagaatagacagaacctctgttactctgtgaccggcaggcaccgggagatccgtagctcagacgccaggacatcccggaagctgggaaatgggactgttgacattcagggatgtggccatagaattctctcgggaggagtgggaacacctggactcagatcagaagcttttatatggggatgtgatgttagagaactacggaaacctggtctctctgggtctcgctgtctctaagccggacctgatcacctttttggagcaaaggaaagagccctggaatgtgaagagtgcagagacagtagccatccagccagatatcttttctcatgatactcaaggcctcttaagaaagaagcttatagaagcatcattccaaaaagtgatattggatggatatgggagctgtggccctcagaatttaaacttaaggaaagagtgggaaagtgagggcaaaataatcctatggtgaaaaaaaatcaacaagataatctctgcatgagaaaaaggaccaaagacaagtgaattttctgagggtgatgaaagtgttgcttcgaaaaggggtgaagtttatatgggtctatttatttgtctaacatgtacagttaaggtttatgccttgcaatgtatgtacatcttcacaaaaaaaatcttaaaaaaattaaatgggtgggggtagggaaagggttgaagtatagatgaagcagaagtggtacatgattagtagttgaagctgggggcaggtctatatattttatttttatgtctttaatagcatttgtataaatgtacaatattcgtttacaatgttagctcaggatcttgtttacctttggacagggagggagggagaaatttattttctgggtaggagtaaagctggttctattcctcagttatgtaaattatctgttataatccaaaaagctttacatgaatgtttctgtatgtaatgtggtatatcaataaaaaattaaatattaaaaaaaa

SEQ ID NO: 213 - DNA, 2122 bp, Homo sapiens
  misc_feature: Incyte ID No: 1814803CB1
cgggggcggggcacctctgtgcagggttcccagtcaccgcgacgctcctcgggaagccatagggcgcctcccagcccgtctccccgctccagtttagaacctaattcccaattcccggaccgggcccagccctgggctcttactgtccgcttttgctgggacctgttccacaaatgggcgtcttctgccttgggccgtgggggttgggccggaagctgcggacgcctgggaaggggccgctgcagctcttgagccgcctctgcggggaccacttgcaggccatcccagccaagaaggccccggctgggcaggaggagcctgggacgccgccctcctcgccgctgagtgccgagcagttggaccggatccagaggaacaaggccgcggccctgctcagactcgcggcccgcaacgtgcccgtgggctttggagagagctggaagaagcacctcagcggggagttcgggaaaccgtattttatcaagctaatgggatttgttgcagaagaaagaaagcattacactgtttatccacccccacaccaagtcttcacctggacccagatgtgtgacataaaagatgtgaaggttgtcatcctgggacaggatccatatcatggacctaatcaagctcacgggctctgctttagtgttcaaaggcctgttccgcctccgcccagtttggagaacatttataaagagttgtctacagacatagaggattttgttcatcctggccatggagatttatctgggtgggccaagcaaggtgttctccttctcaacgctgtcctcacggttcgtgcccatcaagccaactctcataaggagcgaggctgggagcagttcactgatgcagttgtgtcctggctaaatcagaactcgaatggccttgttttcttgctctggggctcttatgctcagaagaagggcagtgccattgataggaagcggcaccatgtactacagacggctcatccctcccctttgtcagtgtatagagggttctttggatgtagacacttttcaaagaccaatgagctgctgcagaagtctggcaagaagcccattgactggaaggagctgtgatcatcagctgaggggtggcctttgagaagctgctgttaacgtatttgccagttacgaagttccactgaaaattttcctattaattcttaagtactctgcataagggggaaaagcttccagaaagcagccatgaaccaggctgtccaggaatggcagctgtatccaaccacaaacaacaaaggctaccctttgaccaaatgtctttctctgcaacatggcttcggcctaaaatatgcagaagacagatgaggtcaaatactcagttggctctctttatctcccttgcctttatggtgaaacaggggagatgtgcacctttcaggcacagccctagtttggcgcctgctgctccttggttttgcctggttagactttcagtgacagatgttggggtgtttttgcttagaaaggtccccttgtctcagccttgcagggcaggcatgccagtctctgccagttccactgcccccttgatctttgaaggagtcctcaggcccctcgcagcataaggatgttttgcaactttccagaatctggcccagaaattagggctcaatttcctgattgtagtagaggttaagattgctgtgagctttatcagataagagaccgagagaagtaagctgggtcttgttattccttgggtgttggtggaataagcagtggaatttgaacaaggaagaggagaaaagggaattttgtctttatggggtggggtgattttctcctagggttatgtccagttggggtttttaaggcagcacagactgccaagtactgttttttttaaccgactgaaatcactttgggatattttttcctgcaacactggaaagttttagttttttaagaagtactcatgcagatatatatatatatatttttcccagtcctttttttaagagacggtctttattgggtctgcacctccatccttgatcttgttagcaatgctgtttttgctgttagtcgggttagagttggctctacgcgaggtttgttaataaaagtttgttaaaagttaaaaaaaaaaa

SEQ ID NO: 214 - DNA, 2332 bp, Homo sapiens
  misc_feature: Incyte ID No: 1141764.8
gcacctgctggagcagcacggcgacgactttgactggttcttcctggtgcctgacaccacctacaccgaggcgcacggcctggcacgcctaactggccacctcagcctggcctccgccgcccacctgtacctggggccggccccaggacttcatcggcggagagcccacccccggccgctactgccacggaggctttggggtgctgctgtcgcgcatgctgctgcaacaactgcgcccccacctggaaggctgccgcaacgacatcgtcagtgcgcgccctgacgagtggctgggtcgctgcattctcgatgccaccggggtgggctgcactggtgaccacgagggggtgcactatagccatctggagctgagccctggggagccagtgcaggagggggaccctcatttccgaagtgccctgacagcccaccctgtgcgtgaccctgtgcacatgtaccagctgcacaaagctttcgcccgagctgaactggaacgcacgtaccaggagatccaggagttacagtgggagatccagaataccagccatctggccgttgatggggaccgggcagctgcttggcccgtgggtattccagcaccatcccgcccggcctcccgctttgaggtgctgcgctgggactacttcacggagcagcatgctttctcctgcgccgatggctcaccccgctgcccactgcgtggggctgaccgggctgatgtggccgatgttctggggacagctctagaggagctgaaccgccgctaccacccggccttgcggctccagaagcagcagctggtgaatggctaccgacgctttgatccggcccggggtatggaatacacgctggacttgcagctggaggcactgaccccccagggaggccgccggcccctcactcgccgagtgcagctgctccggccgctgagccgcgtggagatcttgcctgtgccctatgtcactgaggcctcacgtctcactgtgctgctgcctctagctgcggctgagcgtgacctggcccctggcttcttggaggcctttgccactgcagcactggagcctggtgatgctgcggcagccctgaccctgctgctactgtatgagccgcgccaggcccagcgcgtggcccatgcagatgtcttcgcacctgtcaaggcccatgtggcagagctggagcggcgtttccccggtgcccgggtgccatggctcagtgtgcagacagccgcaccctcaccactacgcctcatggatctactctccaagaagcacccgctggacacactgttcctgctggccgggccagacacggtgctcacgcctgacttcctgaaccgctgccgcatgcatgccatctccggctggcaggccttctttcccatgcatttccaagccttccacccagctgtggccccaccacaagggcctgggcccccagagctgggccgtgacactggccgctttgatcgccaggcagccagcgaggcctgcttctacaactccgactacgtggcagcccgtgggcgcctggcggcagcctcagaacaagaagaggagctgctggagagcctggatgtgtacgagctgttcctccacttctccagtctgcatgtgctgcgggcggtggagccggcgctgctgcagcgctaccgggcccagacgtgcagcgcgaggctcagtgaggacctgtaccaccgctgcctccagagcgtgcttgagggcctcggctcccgaacccagctggccatgctactctttgaacaggagcagggcaacagcacctgaccccaccctgtccccgtgggccgtggcatggccacaccccaccccacttctcccccaaaaccagagccacctgccagcctcgctgggcagggctggccgtagccagaccccaagctggcccactggtcccctctctggctctgtgggtccctgggctctggacaagcactgggggacgtgcccccagagccacccacttctcatcccaaacccagtttccctgccccctgacgctgctgattcgggctgtggcctccacgtatttatgcagtacagtctgcctgacgccagccctgcctctgggccctgggggctgggctgtagaagagttgttggggaaggagggagctgaggagggggcatctcccaacttctcccttttggaccctgccgaagctccctgcctttaataaactggccaagtgtggacttgtgattcagaggttctgaaagggtaggcaggcgtgggggagggaggactggctgagcaccacaggctcacctgcccctgctgggcctgcctttcctttcaccgggacaagtcatgc

SEQ ID NO: 215 - DNA, 4019 bp, Homo sapiens
  misc_feature: Incyte ID No: 406531.1
ctctcttgaagagggctggtatatttgtgcctgctggaggtggaattaacagtaagaaggagaaagggattgaatggacttacaggaaggatttccagttaattccagggaaacacatttacttgaatagtacaacctagagtattattttaccctaagaagaacccaaagaaggtaaaggtattcaccaagctgccggacagatatatattccaacaccaaggtgcagatcagcatagatctgtgattcagaaatcaggatttgttctcggacaagagctcaagggttgagaagcaactcaaaagcaagtgaagattactttgggaactacagtttcatcagcaagatcaacttttgctaattccaataccaaaggcctgattatcataaattcatataggaactgcataggtcatctgatcaaataatattagccgtcttctgctacatcaatgcagcaaaaactcttaacaactgtggataatcggaaatctgagtttcagctttcttagaaatcactactcttgacatattccaaaatatttaaaataggacaggaaaatcggtgaggatgttgtgctcagaaatgtcactgtcatgaaaaataggtaaatttgttttttcagctactgggaaactgtacctcctagaaccttaggtttttttttttttaagaggacaagaaggactaaaaatatcaacttttgcttttggacaaaaatgcatctgactgtatttttacttaagggtattgtgggtttcctctggagctgctgggttctagtgggttatgcaaaaggaggtttgggagacaatcatgttcactccagttttatttatagaagactacggaaccacgaaagacgggaaatacaaagggaaattctctctatcttgggtttgcctcacagacccagaccattttcacctggaaaacaagcgtcctctgcacctctctttatgctggatctctacaatgccatgaccaatgaagaaaatcctgaagagtcggagtactcagtaagggcatccttggcagaagagaccagaggggcaagaaagggatacccagcctctcccaatgggtatcctcgtcgcatacagttatctcggacgactcctctgaccacccagagtcctcctctagccagcctccatgataccaactttctgaatgatgctgacatggtcatgagctttgtcaacttagttgaaagagacaaggatttttctcaccagcgaaggcattacaaagaatttcgatttgatctttacccaaattcctcatggagaggcagtgacagcagctgaattccggatatacaaggaccggagcaacaaccgatttgaaaatgaaacaattaagattagcatatatcaaatcatcaaggaatacacaaatagggatgcagatctgttcttgttagacacaagaaaggcccaagctttagatgtgggttggcttgtctttgatatcactgtgaccagcaatcattgggtgattaatccccagaataatttgggcttacagctctgtgcagaaacaggggatggacgcagtatcaacgtaaaatctgctggtcttgtgggaagacagggacctcagtcaaaacaaccattcatggtggccttcttcaaggcgagtgaggtacttcttgcgatccgtcgcagagtcagacaacaaagcgaaaaaatcaaccaccctgcaaaaaaatccagctctcattcagtgcactcctccagaaatgtccagtggttgggagatttataacacaaagtgagcaaaaaccaagcctgtaaagaagcacgaactctatgtgagcttccgggatctgggatggcaggactggattatagcaccagaaggatacgctgcattttattgtgatggagaatgttcttttccacttaacgcccatatgaatgccaccaaccacgctatagttcagactctggttcatctgatgtttcctgaccacgtacctcgagccttgttgtgctccaaccatattaaatgccatctctgttctgtactttgatgacagctccaatgtcattttgaaaaaatatagaaatatggtagtacgctcatgtggctgccactaatattaaataatattgataataacaaaaagatctgtattaaggtttatggctgcaataaaaagcatactttcagacaaacggggaatttcctaaaattagtctggctcattttgactcttttcctatgtacaatatcatgtatatagtcatttttatttatttaaacgtatatattctcttctgtggaggctttatcaataaaatctatttcataggccactacattatacaatagatcatctagtataattttcaatgggttatgctgagtccattcaattccatttcaacatttttttctaatacaattttacataattttctgagattagacagaactcctttgactgtttaatattgtggaaggaaattgaataatttagttatattgtgccaatgaaaacccatgatagaatatttatttagaaataagacttaaaaaaataacaacccaaacaaaaattcttggataaacacaatttctcttttagagttcctgcttcattagataaagtgaaagtgttgaactggatttgaataaataaacggtaggcagaacatagaagctgaaagattgcacagaattgttttaactgtttgctttaacagaagtggtagtaactgtaggagcatgttcctttattggcttgtggattgtagattttgcaaagagctcaaagcttcagggagacaggcttgagcctgtgtccatagctttccaagttaacactaattgtagtacaaccttcttacctcaaataaatcatgtctgcctattatctagaacactactgctggcagaatttttttttcagatttaaacaacctagtccaaaataaagaaacatttacatgtgctccactttcctccccacaggcaagagtcactgcatgcgtacaaatgtacaagagcagaagatgccgaaagaaccattttactttagctctcctttataactgacgttggctgattgatgtgatgcaagggattttatttagaagtaaaagcactgaaactaaactggaggaaattaccaaaagtcccagaatggctttgacagaattgccagtttctaaagaacagctgaaattcattgtttcatatctttgaggagtgagctcaatggaaaaccttattttgttaaagggcatttttgttaaaccttcttcccaagcacaaataattccaaacaggaaggttctgttgtgtgtgtgtgtgtgtgtgtctgtgtgtgcatgtgtgttcttccctctaaaattaatttattttctcctatctattagaatgccctctaaggcctttctgtaacacacactgacttttttgaagaatggtctttaagattgataacttgctatttaatggtgactctgtggttaggcttatttaccgttaatctaaagtattcataaagcaccatttattaatcatccttttggatctttcaaaccaaacgtataccaaaaatgtcttcaaaaatgttatggctttgtttgtaattcgggtatattaaaatgttgttttgaaatacagtttatcttaaagaaaatttgacagtaactatattaaggggtacattaagtaatatatttttaattaatggtgtaccattgagagaataagaaatggaagtctattgttttattctttaaatgtgctgtttaaatatatttccatattttaaaatatattaaacagatgctaatttctgctgttcttgatttggttctttatttaaaaggaatacaaaatgtaagtatatcataaattgagacaataagaatatttatcaaatgtaaactgtttgtggatcacatgattctttatgttgttcttaattgccaaaattgttttttgtgttgttaataattatctcactattaaatgtgcaaagcaacaatccatgaaaaa

SEQ ID NO: 216 - DNA, 405 bp, Homo sapiens
  misc_feature: Incyte ID No: 429307.4
aaggctcctgagctccccggcactgcaacccctctgcctgtttccatggagtgggggccaggcccttctcctgagagctcccagctctcccttctccctgccctggagttggcttagctctcagaccccttctcacctcctcttctctctcccacagtcttcacctcctcttcgtcctcttcgagccgtcagacctggcccatcctcaaggagcagggctcatccagcttcagccagggtcagtgctcctagaactgagctgcctctaccacagcctcctgcccaccagctggcctcacctcctgaaggcctgggtcaggaccctgctctcccagcgcagttcccagctgtctccctgctcctctactggtgatgggctaataaagctgactttctggttgatgc

SEQ ID NO: 217 - DNA, 1237 bp, Homo sapiens
  misc_feature: Incyte ID No: 239515.9
aaaaagtcaactactcgtcttgatcttcattagtgttagattgccatctctggtcccaaggagcacttatcaaagtttgtaatttaactaccttgctttaatgaaaagaaaatggaagaatcagccatttttttttccgttgtagtgtggagacaatcaatgatggaaacttccacattgtggaactacttgccttggatcagagtctctctttgtccgtggatggtgggaaccccaaaatcatcactaacttgtcaaagcagtccactctgaattttgactctccactctatgtaggaggcatgccagggaagagtaacgtggcatctctgcgccaggcccctgggcagaacggaaccagcttccacggctgcatccggaacctttacatcaacagtgagctgcaggacttccagaaggtgccgatgcaaacaggcattttgcctggctgtgagccatgccacaagaaggtgtgtgcccatggcacatgccagcccagcagccaggcaggcttcacctgcgagtgccaggaaggatggatggggcccctctgtgaccaacggaccaatgacccttgccttggaaataaatgcgtacatggcacctgcttgcccatcaatgcgttctcctacagctgtaagtgcttggagggccatggaggtgtcctctgtgatgaagaggaggatctgtttaacccatgccaggcgatcaagtgcaagcatgggaagtgcaggctttcaggtctggggcagccctactgtgaatgcagcagtggatacacgggggacagctgtgatcgagaaatctcttgtcgaggggaaaggataagagattattaccaaaagcagcagggctatgctgcttgccaaacaaccaagaaggtgtcccgattagagtgcagaggtgggtgtgcaggagggcagtgctgtggaccgctgaggagcaagcggcggaaatactctttcgaatgcactgacggctcctcctttgtggacgaggttgagaaagtggtgaagtgcggctgtacgaggtgtgtgtcctaaacacactcccggcagctctgtctttggaaaaggttgtatacttcttgaccatgtgggactaatgaatgcttcatagtggaaatatttgaaatatattgtaaaatacagaacagacttatttttattatgagaataaagactttttttctgcatttggaaaaaaaaaaaaaaaaaaaacaaaaagaggcggcgcg

SEQ ID NO: 218 - DNA, 1199 bp, Homo sapiens
  misc_feature: Incyte ID No: 1089210.1
aaggaaacaggatctgcttagtgaaagaagtggcaagcaatggatcccaaatatcagcgtgtagagctaaatgatggtcacttcatgcccgtattgggatttggcacctatgcacctccagaggttccgaggaacagagctgtggaggtcaccaaattagcaatagaagctggcttccgccatattgattctgcttatttatacaataatgaggagcaggttggactggccatccgaagcaagattgcagatggcagtgtgaagagagaagacatattctacacttcaaagctttggtgcactttctttcaaccacagatggtccaaccagccttggaaagctcactgaaaaaactttaactggactatgttgacctctatcttcttcatttcccaatggctctcaagccaggtgagacgccactaccaaaagatgaaaatggaaaagtaatattcgacacagtggatctctctgccacatgggaggtcatggagaagtgtaaggatgcaggattggccaagtccatcggggtgtcaaacttcaactgcaggcagctggagatgatcctcaacaagccaggactcaagtacaagcctgtctgcaaccaggtagaatgtcatccttacctcaaccagagcaaactgctggatttctgcaagtcaaaagacattgttctggttgcccacagtgctctgggaacccaacgacataaactatgggtggacccaaactccccagttcttttggaggacccagttctttgtgccttagcaaagaaacacaaacgaaccccagccctgattgccctgcgctaccagctgcagcgtggggttgtggtcctggccaagagctacaatgagcagcggatcagagagaacatccaggtttttgaattccagttgacatcagagggatatgaaagttctagatggtctaaacagaaattatcgatatgttgtcatggattttcttatggaccatcctgattatccattttcagatgaatattagcatagagggtgttgcacgacatctagcagaaggccctgtgtgtggatggtgatgcagaggatgtctctatgctggtgactggacacacggcctctggttaaatccctcccctcctgcttggcaacttcagctagctagatatatccatggtccagaaagcaaacataataaatttttatcttgaagt

SEQ ID NO: 219 - DNA, 1597 bp, Homo sapiens
  misc_feature: Incyte ID No: 010796.18
acgaggaggaggcaaagttagagttggggctggcgctccggagttgctgggctcagcgcagctcccattcattaaggaaccagctgcggaggaaggtggccgagcgcccgcgctgcccactcgctcgctcgcgcactcagacgcgcgccacaacagcgcgccccaagctgcgcagctctgcaaaagtttctgctcgggatctggctctcttccccttggactttagaacgatttagggttgacagaggaaagcagaggcgcgcaggaggagcagaaaacaccaccttctgcagttggaggcaggcagccccggctgcactctagccgcctgggtgtgtggctgctgttgcgggacgtcttcgcggggcgggaggctcgcgccgcagccagcgccatgcaaaactacaagtacgacaaagcgatcgtcccggagagcaagaacggcggcagcccggcgctcaacaacaacccgaggaggagcggcagcaagcgggtgctgctcatctgcctcgacctcttctgcctcttcatggcgggcctccccttcctcatcatcgagacaagcaccatcaagccttaccaccgagggttttactgcaatgatgagagcatcaagtacccactgaaaactggtgagacaataaatgacgctgtgctctgtgccgtggggatcgtcattgccatcctcgcgatcatcacgggggaattctaccggatctattacctgaagaagtcgcggtcgacgattcagaacccctacgtggcagcactctataagcaagtgggctgcttcctctttggctgtgccatcagccagtctttcacagacattgccaaagtgtccatagggcgcctgcgtcctcacttcttgagtgtctgcaaccctgatttcagccagatcaactgctctgaaggctacattcagaactacagatgcagaggtgatgacagcaaagtccaggaagccaggaagtccttcttctctggccatgcctccttctccatgtacactatgctgtatttggtgctatacctgcaggcccgcttcacttggcgaggagcccgcctgctccggcccctcctgcagttcaccttgatcatgatggccttctacacgggactgtctcgcgtatcagaccacaagcaccatcccagtgatgttctggcaggatttgctcaaggagccctggtggcctgctgcatagttttcttcgtgtctgacctcttcaagactaagacgacgctctccctgcctgcccctgctatccggaaggaaatcctttcacctgtggacattattgacaggaacaatcaccacaacatgatgtaggtgccacccacctcctgagctgtttttgtaaaatgactgctgacagcaagttcttgctgctctccaatctcatcagacagtagaatgtagggaaaaacttttgcccgacctcctgagctgtttttgtaaaatgactgctgacagcaagttcttgctgctctccaatctcatcagacagtagaatgtagggaaaaacttttgcccgactgatttttataaaggaacaaaaaaatgttttactatgtggccttccagaataggtagtgt

SEQ ID NO: 220 - DNA, 1197 bp, Homo sapiens
  misc_feature: Incyte ID No: 3752346CB1
cccgcggattggccggaagcaggcgccgcttcgaggcccgcggaaaacgcgcgccgagacccgctcctgcagtattagttcttgcagctggtggcggcggctgaggcggcatggatctcagcgagctggagagagacaatacaggccgctgtcgcctgagttcgcctgtgcccgcggtgtgccgcaaggagccttgcgtcctgggcgtcgatgaggcgggcaggggccccgtgctgggccccatggtctacgccatctgttattgtcccctgcctcgcctggcagatctggaggcgctgaaagtggcagactcaaagaccctattggagagcgagcgggaaaggctgtttgcgaaaatggaggacacggactttgtcggctgggcgctggatgtgctgtctccaaacctcatctctaccagcatgcttgggcgggtcaaatacaacctgaactccctgtcacatgatacagccactgggcttatacagtatgcattggaccagggcgtgaacgtcacccaggtattcgtggacaccgtagggatgccagagacataccaggcgcggctgcagcaaagttttcccgggattgaggtgacggtcaaggccaaagcagatgccctctacccggtggttagtgctgccagcatctgtgccaaggtggcccgggaccaggccgtgaagaaatggcagttcgtggagaaactgcaggacttggatactgattatggctcaggctaccccaatgatcccaagacaaaagcgtggttgaaggagcacgtggagcctgtgttcggcttcccccagtttgtccggttcagctggcgcacggcccagaccatcctggagaaagaggcggaagatgttatatgggaggactcagcatccgagaatcaggagggactcaggaagatcacatcctacttcctcaatgaagggtcccaagcccgtccccgttcttcccaccgatatttcctggaacgcggcctggagtcagcaaccagcctctagcagctgcctctacgcgctctacctgcttccccaacccagacattaaaattgtttaaggagaaccacacgtaggggatgtacttttgggacagaagcaaggtgggagtgtgctctgcagccgggtccagctacttccttttggaaccttaaatagaatgggtgttggttgattaaaaaaaaaaaaaaa

SEQ ID NO: 221 - DNA, 1719 bp, Homo sapiens
  misc_feature: Incyte ID No: 2729828CB1
cccacgcgtccgggccaagcaagcttctatctgcacctgctctcaatcctgctctcaccatgagcctccgcctgcagagctcctctgccagctatggaggtggtttcgggggtggctcttgccagctgggaggaggccgtggtgtctctacctgttcaactcggtttgtgtctgggggatcagctgggggctatggaggcggcgtgagctgtggttttggtggaggggctggtagtggctttggaggtggctatggaggtggccttggaggtggctatggaggtggccttggaggtggctttggtgggggttttgctggtggctttgttgactttggtgcttgtgatggcggcctcctcactggcaatgagaagatcaccatgcagaacctcaacgaccgcctggcttcctacctggagaaggtgcgcgccctggaggaggccaacgctgacctggaggtgaagatccgtgactggcacctgaagcagagcccagctagccctgagcgggactacagcccctactacaagaccattgaagagctccgggacaagatcctgaccgccaccattgaaaacaaccgggtcatcctggagattgacaatgccaggctggctgtggacgacttcaggctcaagtatgagaatgagctggccctgcgccagagcgtggaggccgacatcaacggcctgcgccgggtgctggatgagctcactctgtctaagactgacctggagatgcagatcgagagcctgaatgaagagctagcctacatgaagaagaaccatgaagaggagatgaaggaatttagcaaccaggtggtcggccaggtcaacgtggagatggatgccaccccaggcattgacctgacccgcgtgctggcagagatgagggagcagtacgaggccatggcagagaggaaccgccgggatgctgaggaatggttccacgccaagagtgcagagctgaacaaggaggtgtctaccaacactgccatgattcagaccagcaagacagagatcacggagctcaggcgcacgctccaaggcctggagattgagctgcagtcccagctgagcatgaaagcggggctggagaacacggtggcagagacggagtgccgctatgccctgcagctgcagcagatccagggactcatcagcagcatcgaggcccagctgagcgagctccgcagtgagatggagtgccagaaccaagagtacaagatgctgctggacatcaagacacgtctggagcaggagatcgccacctaccgcagcctgctcgagggccaggacgccaagatgattggtttcccttcctcagcaggaagcgtcagcccccgtagcacctctgttaccacgacttctagtgcctctgttaccaccacctctaatgcctctggtcgccgcacttctgatgtccgtaggccttaaatctgcctggcgtcccctccctctgtcttcagcacccagaggaggagagagccggcagttccctgcaggagagaggaggggctgctggacccaaggctcagtccctctgctctcaggaccccctgtcctgactctctcctgatggtgggccctctgtgctcttctcttccggtcggatctctctcctctctgacctggatacgctttggtttctcaacttctctaccccaaagaaaagattattcaataaagtttcctgcctttctgcaaaaaaaaaaaaaaa

SEQ ID NO: 222 - DNA, 1743 bp, Homo sapiens
  misc_feature: Incyte ID No: 1648579CB1
  unsure 60, 70, 82, 104, 1679, 1685, 1688, 1691-1693, 1696-1697, 1703, 1716,1738: a, t, c, g, or other
gaggacgaagccagttctctttttctggtctgactggcttggaaattccccgagcctgancccgccccanagaaatccccanccagcgtttatagggcgccgcngcggcgctgcagagcccacagcagtccgtgccgccgtcccgcccgccagcgccccagcgaggaagcagcgcgcacccgcggcccagcgcacccgcagcagcgcccgcagctcgtccgcgccatgttccaggcggccgagcgcccccaggagtgggccatggagggcccccgcgacgggctgaagaaggagcggctactggatgaccgccacgacagcggcctggactccatgaaagacgaggagtacgagcagatggtcaaggagctgcaggagatccgcctcgagccgcaggaggtgccgcgcggctcggagccctggaagcagcagctcaccgaggacggggactcgttcctgcacttggccatcatccatgaagaaaaggcactgaccatggaagtgatccgccaggtgaagggagacctggccttcctcaacttccagaacaacctgcagcagactccactccacttggctgtgatcaccaaccagccagaaattgctgaggcacttctgggagctggctgtgatcctgagctccgagactttcgaggaaatacccccctacaccttgcctgtgagcagggctacctgggcatcgtgggagtcctgactcagtcctgcaccaccccgcacctccactccatcctgaaggctaccaactacaatggccacacgtgtctacacttagcctctatccatggctacctgggcatcgtggagcttttggtgtccttgggtgctgatgtcaatgctcaggagccctgtaatggccggactgcccttcacctcgcagtggacctgcaaaatcctgacctggtgtcactcctgttgaagtgtggggctgatgtcaacagagttacctaccagggctattctccctaccagctcacctggggccgcccaagcacccggatacagcagcagctgggccagctgacactagaaaaccttcagatgctgccagagagtgaggatgaggagagctatgacacagagtcagagttcacggagttcacagaggacgagctgccctatgatgactgtgtgtttggaggccagcgtctgacgttatgagcgcaaaggggctgaaagaacatggacttgtatatttgtacaaaaaaaaagttttatttttctaaaaaaagaaaaaagaagaaaaaatttaaagggtgtacttatatccacactgcacactgcctagcccaaaacgtcttattgtggtaggatcagccctcattttgttgcttttgtgaactttttgtaggggacgagaaagatcattgaaattctgagaaaacttcttttaaacctcacctttgtggggtttttggagaaggttatcaaaaatttcatggaaggaccacattttatatttattgtgcttcgagtgactgaccccagtggtatcctgtgacatgtaacagccaggagtgttaagcgttcagtgatgtggggtgaaaagttactacctgtcaaggtttgtgttaccctcctgtaaatggtgtacataatgtattgttggtaattattttggtacttttatgatgtatatttattaaacagatttttacaantgtaanaanaannnaannataatnaacagaataccanaggaggaaataaagcacactcnggggg

SEQ ID NO: 223 - DNA, 1793 bp, Homo sapiens
  misc_feature: Incyte ID No: 1454418CB1
ggagcggccgccgcggtaataataagccgggatctaccatacccattgactaactatggaagattataccaaaatagagaaaattggagaaggtacctatggagttgtgtataagggtagacacaaaactacaggtcaagtggtagccatgaaaaaaatcagactagaaagtgaagaggaaggggttcctagtactgcaattcgggaaatttctctattaaaggaacttcgtcatccaaatatagtcagtcttcaggatgtgcttatgcaggattccaggttatatctcatctttgagtttctttccatggatctgaagaaatacttggattctatccctcctggtcagtacatggattcttcacttgttaagagttatttataccaaatcctacaggggattgtgttttgtcactctagaagagttcttcacagagacttaaaacctcaaaatctcttgattgatgacaaaggaacaattaaactggctgattttggccttgccagagcttttggaatacctatcagagtatatacacatgaggtagtaacactctggtacagatctccagaagtattgctggggtcagctcgttactcaactccagttgacatttggagtataggcaccatatttgctgaactagcaactaagaaaccacttttccatggggattcagaaattgatcaactcttcaggattttcagagctttgggcactcccaataatgaagtgtggccagaagtggaatctttacaggactataagaatacatttcccaaatggaaaccaggaagcctagcatcccatgtcaaaaacttggatgaaaatggcttggatttgctctcgaaaatgttaatctatgatccagccaaacgaatttctggcaaaatggcactgaatcatccatattttaatgatttggacaatcagattaagaagatgtagctttctgacaaaaagtttccatatgttatgtcaacagatagttgtgtttttattgttaactcttgtctatttttgtcttatatatatttctttgttatcaaacttcagctgtacttcgtcttctaatttcaaaaatataacttaaaaatgtaaatattctatatgaatttaaatataattctgtaaatgtgtgtaggtctcactgtaacaactatttgttactataataaaactataatattgatgtcaggaatcaggaaaaaatttgagttggcttaaatcatctcagtccttatggcagttttattttcctgtagttggaactactaaaatttaggaaaatgctaagttcaagtttcgtaatgctttgaagtatttttatgctctgaatgtttaaatgttctcatcagtttcttgccatgttgttaactatacaacctggctaaagatgaatatttttctactggtattttaatttttgacctaaatgtttaagcattcggaatgagaaaactatacagatttgagaaatgatgctaaatttataggagttttcagtaacttaaaaagctaacatgagagcatgccaaaatttgctaagtcttacaaagatcaagggctgtccgcaacagggaagaacagttttgaaaatttatgaactatcttatttttaggtaggttttgaaagctttttgtctaagtgaattcttatgccttggtcagagtaataactgaaggaggtgcttatcttggctttcgagtctgagtttaaaactacacattttgacatagtgtttattagcagccatctaaaaaggctctaatgtatatttaactaaaatta

SEQ ID NO: 224 - DNA, 1897 bp, Homo sapiens
  misc_feature: Incyte ID No: 995529.10
tcgcacttggcttcaaagctggctcttggaaattgagcggagagcgacgcggttgttgtagctgccgctgcggccgccgcggaataataagccgggatctaccatacccattgactaactatggaagattataccaaaatagagaaaattggagaaggtacctatggagttgtgtataagggtagacacaaaactacaggtcaagtggtagccatgaaaaaaatcagactagaaagtgaagaggaaggggttcctagtactgcaattcgggaaatttctctattaaaggaacttcgtcatccaaatatagtcagtcttcaggatgtgcttatgcaggattccaggttatatctcatctttgagtttctttccatggatctgaagaaatacttggattctatccctcctggtcagtacatggattcttcacttgttaagagttatttataccaaatcctacaggggattgtgttttgtcactctagaagagttcttcacagagacttaaaacctcaaaatctcttgattgatgacaaaggaacaattaaactggctgattttggccttgccagagcttttggaatacctatcagagtatatacacatgaggtagtaacactctggtacagatctccagaagtattgctggggtcagctcgttactcaactccagttgacatttggagtataggcaccatatttgctgaactagcaactaagaaaccacttttccatggggattcagaaattgatcaactcttcaggattttcagagctttgggcactcccaataatgaagtgtggccagaagtggaatctttacaggactataagaatacatttcccaaatggaaaccaggaagcctagcatcccatgtcaaaaacttggatgaaaatggcttggatttgctctcgaaaatgttaatctatgatccagccaaacgaatttctggcaaaatggcactgaatcatccatattttaatgatttggacaatcagattaagaagatgtagctttctgacaaaaagtttccatatgttatgtcaacagatagttgtgtttttattgttaactcttgtctatttttgtcttatatatatttctttgttatcaaacttcagctgtacttcgtcttctaatttcaaaaatataacttaaaaatgtaaatattctatatgaatttaaatataattctgtaaatgtgtgtaggtctcactgtaacaactatttgttactataataaaactataatattgatgtcaggaatcaggaaaaaatttgagttggcttaaatcatctcagtccttatggcagttttattttcctgtagttggaactactaaaatttaggaaaatgctaagttcaagtttcgtaatgctttgaagtatttttatgctctgaatgtttaaatgttctcatcagtttcttgccatgttgttaactatacaacctggctaaagatgaatatttttctactggtattttaatttttgacctaaatgtttaagcattcggaatgagaaaactatacagatttgagaaatgatgctaaatttataggagttttcagtaacttaaaaagctaacatgagagcatgccaaaatttgctaagtcttacaaagatcaagggctgtccgcaacagggaagaacagttttgaaaatttatgaactatcttatttttaggtaggttttgaaagctttttgtctaagtgaattcttatgccttggtcagagtaataactgaaggaggtgcttatcttggctttcgagtctgagtttaaaactacacattttgacatagtgtttattagcagccatctaaaaaggctctaatgtatatttaactaaaattactagctttgggaattaaactgtttaacaaaaaaaaaaat

SEQ ID NO: 225 - DNA, 1570 bp, Homo sapiens
  misc_feature: Incyte ID No: 2126751CB1
ccggaaagtcttcgcggcggaggcccgggcaactcttttgaatggaatcgggctgattcatcgccggtttgcagactgagccgcgtcgggtgtgcgccgctgctgctgttgcctctgtcttcgcgtcaccacagaggcaagacaagggtccatatcgcggcatccggctcccgcccgtcttcaggagagaaagaaaaaataaaatatacttggggaagttgtacctgccagaattagcaagagctttctttaagaagacatttgtcaaactcaacaaattgaaggttaacaccttaagagttgtagttactgaccagaaatatggacagacttcttagacttggaggaggtatgcctggactgggccaggggccacctacagatgctcctgcagtggacacagcagaacaagtctatatctcttccctggcactgttaaaaatgttaaaacatggccgtgctggagttccaatggaagttatgggtttgatgcttggagaatttgttgatgattataccgtcagagtgattgatgtgtttgctatgccacagtcaggaacaggtgtcagtgtggaggcagttgatccagtgttccaagctaaaatgttggatatgttgaagcagacaggaaggccggagatggttgttggttggtatcacagtcaccctggctttggttgttggctttctggtgtggatatcaacactcagcagagctttgaagccttgtcggagagagctgtggcagtggttgtggatcccattcagagtgtaaaaggaaaggttgttattgatgccttcagattgatcaatgctaatatgatggtcttaggacatgaaccaagacaaacaacttcgaatctgggtcacttaaacaagccatctatccaggcattaattcatggactaaacagacattattactccattactattaactatcggaaaaatgaactggaacagaagatgttgctaaatttgcataagaagagttggatggaaggtttgacacttcaggactacagtgaacattgtaaacacaatgaatcagtggtaaaagagatgttggaattagccaagaattacaataaggctgtagaagaagaagataagatgacacctgaacagctggcaataaagaatgttggcaagcaggaccccaaacgtcatttggaggaacatgtggatgtacttatgacctcaaatattgtccagtgtttagcagctatgttggatactgtcgtatttaaataaagcaacgaaaaacgctattaatgatgccttcagtgtatattcctctgttgttcctaatgctcaaaatcaagggacctctgaaggtgtacttggctaaatgtaagacatctggcatcatttgcagcactgtaacaccttcagtctcagttgtgcaattacttctgtttctttagtcagggtctttgcagattctaaagttatacatgaatacatcaaagtggacaaattttgttaagatcccatttaatatttgaaaaaatcagtagcacaaatatattttgattgtcacttacaaaataaaatacatttacagtct

SEQ ID NO: 226 - DNA, 1835 bp, Homo sapiens
  misc_feature: Incyte ID No: 569648CB1
ctgcgaggtttacaaccagctgcagtggttcgatgggaaggatctttctccaagtggttcctcttgaggggagcatttctgctggctccaggactttggccatctataaagcttggcaatgagaaataagaaaattctcaaggaggacgagctcttgagtgagacccaacaagctgcttttcaccaaattgcaatggagcctttcgaaatcaatgttccaaagcccaagaggagaaatggggtgaacttctccctagctgtggtggtcatctacctgatcctgctcaccgctggcgctgggctgctggtggtccaagttctgaatctgcaggcgcggctccgggtcctggagatgtatttcctcaatgacactctggcggctgaggacagcccgtccttctccttgctgcagtcagcacaccctggagaacacctggctcagggtgcatcgaggctgcaagtcctgcaggcccaactcacctgggtccgcgtcagccatgagcacttgctgcagcgggtagacaacttcactcagaacccagggatgttcagaatcaaaggtgaacaaggcgccccaggtcttcaaggtcacaagggggccatgggcatgcctggtgcccctggcccgccgggaccacctgctgagaagggagccaagggggctatgggacgagatggagcaacaggcccctcgggaccccaaggcccaccgggagtcaagggagaggcgggcctccaaggaccccagggtgctccagggaagcaaggagccactggcaccccaggaccccaaggagagaagggcagcaaaggcgatgggggtctcattggcccaaaaggggaaactggaactaagggagagaaaggagacctgggtctcccaggaagcaaaggggacaggggcatgaaaggagatgcaggggtcatggggcctcctggagcccaggggagtaaaggtgacttcgggaggctaggcccaccaggtttggctggttttcctggagctaaaggagatcaaggacaacctggactgcagggtgttccgggccctcctggtgcagtgggacacccaggtgccaagggtgagcctggcagtgctggctcccctgggcgagcaggacttccagggagccccgggagtccaggagccacaggcctgaaaggaagcaaaggggacacaggacttcaaggacagcaaggaagaaaaggagaatcaggagttccaggccctgcaggtgtgaagggagaacaggggagcccagggctggcaggtcccaagggagcccctggacaagctggccagaagggagaccagggagtgaaaggatcttctggggagcaaggagtaaagggagaaaaaggtgaaagaggtgaaaactcagtgtccgtcaggattgtcggcagtagtaaccgaggccgggctgaagtttactacagtggtacctgggggacaatttgcgatgacgagtggcaaaattctgatgccattgtcttctgccgcatgctgggttactccaaaggaagggccctgtacaaagtgggagctggcactgggcagatctggctggataatgttcagtgtcggggcacggagagtaccctgtggagctgcaccaagaatagctggggccatcatgactgcagccacgaggaggacgcaggcgtggagtgcagcgtctgacccggaaaccctttcacttctctgctcccgaggtgtcctcgggctcatatgtgggaaggcagaggatctctgaggagttccctggggacaactgagcagcctctggagaggggccattaataaagctcaacatcattggctgtgaaaaaaaaaa

SEQ ID NO: 227 - DNA, 1979 bp, Homo sapiens
  misc_feature: Incyte ID No: 1352789CB1
ttctcaacatcctggcttagtattgtgtgcaaaatcagagaggggtgcaagatcctgatttttcaggagttcaagcgacaatggcagcccaatacggcagtatgagcttcaaccccagcacaccaggggccagttatgggcctggaaggcaagagcccagaaattcccaattgagaattgtgttagtgggtaaaaccggagcaggaaaaagtgcaacaggaaacagcatccttggccggaaagtgtttcattctggcactgcagcaaaatccattaccaagaagtgtgagaaacgcagcagctcatggaaggaaacagaacttgtcgtagttgacacaccaggcattttcgacacagaggtgcccaatgctgaaacgtccaaggagattattcgctgcattcttctgacctccccagggcctcatgctctgcttctggtggttccactgggccgttacactgaggaagagcacaaagccacagagaagatcctgaaaatgtttggagagagggctagaagtttcatgattctcatattcacccggaaagatgacttaggtgacaccaatttgcatgactacttaagggaagctccagaagacattcaagacttgatggacattttcggtgaccgctactgtgcgttaaacaacaaggcaacaggcgctgagcaggaggcccagagggcacagttgctgggcctgatccagcgcgtggtgagggagaacaaggaaggctgctacactaataggatgtaccaaagggcggaggaggagatccagaagcaaacacaagcaatgcaagaactccacagagtggagctggagagagagaaagcgcggataagagaggagtatgaagagaaaatcagaaagctggaagataaagtggagcaggaaaagagaaagaagcaaatggagaagaaactagcagaacaggaggctcactatgctgtaaggcagcaaagggcaagaacggaagtggagagtaaggatgggatacttgaattaatcatgacagcgttacagattgcttcctttattttgttacgtctgttcgcggaagattaaacttaatgaaaatctgtttgtattttctgcatattctctggcaaccttgccccatacttacttatttagcatagtcgagtgctctagtttctgtctctcaggcactcgtaactaaggaccaccattggccattggtagatgtttgattgacttaacaagagagggacaaattttcaatttgtgaaactccaaagcagaaagtattggtgcttgctaccttgtgaattcttccttagacatgcagagaaaatgtatgcaagagaccaaaaagatggctccaagctatgtcatgttacctgtaataaaatcttttcttctagattctttctatgttggcagataatctccccttgtagcttccactcacttattcttgcattcagagtcacaatgatcatcttacccatgtggtttttgagaaagaaagatcaattctttgtttgcagtaggtaatcttagagatggagatgattgtagaattattcctagatgagtgtcaatttatttaattccattgtcatataaggagtcaaattgtttcttatcatttgttcattgaagaacagagacctgtctggaaaatcgatctctacaaattcaattaaataatgatccccaaatgctgaaaaagtgaaatacagcaattcaacagataatagagcaatgtttagtatattcagctgtatctgtagaaactctttgacgaacctcaatttaaccaatttgatgaatacccagttctcttcttttctagagaaagatagttgcaacctcacctccctcactcaacactttgaatacttattgtttggcaggtcatccacacacttctgcccccactgcattgaattttttgcttatgttgtttataataaaacttttcaattatctcataaaaaaaaaaaaaaa

SEQ ID NO: 228 - DNA, 1711 bp, Homo sapiens
  misc_feature: Incyte ID No: 1635966CB1
tttgatacgggagttcctccttgctctcgcccctactctttctggtgttagatcgagctaccctctaaaagcagtttagagtggtaaaaaaaaaaaaaaaacacaccaaacgctcgcagccacaaaagggatgaaatttcttctggacatcctcctgcttctcccgttactgatcgtctgctccctagagtccttcgtgaagctttttattcctaagaggagaaaatcagtcaccggcgaaatcgtgctgattacaggagctgggcatggaattgtgagactgactgcctatgaatttgctaaacttaaaagcaagctggttctctgggatataaataagcatggactggaggaaacagctgccaaatgcaagggactgggtgccaaggttcatacctttgtggtagactgcagcaaccgagaagatatttacagctctgcaaagaaggtgaaggcagaaattggagatgttagtattttagtaaataatgctggtgtagtctatacatcagatttgtttgctacacaagatcctcagattgaaaagacttttgaagttaatgtacttgcacatttctggactacaaaggcatttcttcctgcaatgacgaagaataaccatggccatattgtcactgtggcttcggcagctggacatgtctcggtccccttcttactggcttactgttcaagcaagtttgctgctgttggatttcataaaactttgacagatgaactggctgccttacaaataactggagtcaaaacaacatgtctgtgtcctaatttcgtaaacactggcttcatcaaaaatccaagtacaagtttgggacccactctggaacctgaggaagtggtaaacaggctgatgcatgggattctgactgagcagaagatgatttttattccatcttctatagcttttttaacaacattggaaaggatccttcctgagcgtttcctggcagttttaaaacgaaaaatcagtgttaagtttgatgcagttattggatataaaatgaaagcgcaataagcacctagttttctgaaaactgatttaccaggtttaggttgatgtcatctaatagtgccagaattttaatgtttgaacttctgttttttctaattatccccatttcttcaatatcatttttgaggctttggcagtcttcatttactaccacttgttctttagccaaaagctgattacatatgatataaacagagaaatacctttagaggtgactttaaggaaaatgaagaaaaagaaccaaaatgactttattaaaataatttccaagattatttgtggctcacctgaaggctttgcaaaatttgtaccataaccgtttatttaacatatatttttatttttgattgcacttaaattttgtataatttgtgtttctttttctgttctacataaaatcagaaacttcaagctctctaaataaaatgaaggactatatctagtggtatttcacaatgaatatcatgaactctcaatgggtaggtttcatcctacccattgccactctgtttcctgagagatacctcacattccaatgccaaacatttctgcacagggaagctagaggtggatacacgtgttgcaagtataaaagcatcactgggatttaaggagaattgagagaatgtacccacaaatggcagcaataataaatggatcacacttaaaaaaaaaaaaaaa

SEQ ID NO: 229 - DNA, 4204 bp, Homo sapiens
  misc_feature: Incyte ID No: 349415.6
acgcaggcagtgatgtcacccagaccacaccccttcccccaatgccacttcagggggtactcagagtcagagacttggtctgaggggagcagaagcaatctgcagaggatggcggtccaggctcagccaggcatcaacttcaggaccctgagggatgaccgaaggccccgcccacccacccccaactcccccgaccccaccaggatctacagcctcaggacccccgtcccaatccttaccccttgccccatcaccatcttcatgcttacctccacccccatccgatccccatccaggcagaatccagttccacccctgcccggaacccagggtagtaccgttgccaggatgtgacgccactgacttgcgcattggaggtcagaagaccgcgagattctcgccctgagcaacgagcgacggcctgacgtcggcggagggaagccggcccaggctcggtgaggaggcaaggtaagacgctgagggaggactgaggcgggcctcacctcagacagagggcctcaaataatccagtgctgcctctgctgccgggcctgggccaccccgcaggggaagacttccaggctgggtcgccactacctcaccccgccgacccccgccgctttagccacggggaactctggggacagagcttaatgtggccagggcagggctggttagaagaggtcagggcccacgctgtggcaggaatcaaggtcaggaccccgagagggaactgagggcagcctaaccaccaccctcaccaccattcccgtcccccaacacccaaccccacccccatcccccattcccatccccacccccacccctatcctggcagaatccgggctttgcccctggtatcaagtcacggaagctccgggaatggcggccaggcacgtgagtcctgaggttcacatctacggctaagggagggaaggggttcggtatcgcgagtatggccgttgggaggcagcgaaagggcccaggcctcctggaagacagtggagtcctgaggggacccagcatgccaggacagggggcccactgtacccctgtctcaaaccgaggcaccttttcattcggctacgggaatcctagggatgcagacccacttcagcagggggttggggcccagccctgcgaggagtcatggggaggaagaagagggaggactgaggggaccttggagtccagatcagtggcaaccttgggctgggggatgctgggcacagtggccaaatgtgctctgtgctcattgcgccttcagggtgaccagagagttgagggctgtggtctgaagagtgggacttcaggtcagcagagggaggaatcccaggatctgcagggcccaaggtgtacccccaaggggcccctatgtggtggacagatgcagtggtcctaggatctgccaagcatccaggtgaagagactgagggaggattgagggtacccctgggacagaatgcggactgggggccccataaaaatctgccctgctcctgctgttacctcagagagcctgggcagggctgtcagctgaggtccctccattatcctaggatcactgatgtcagggaaggggaagccttggtctgagggggctgcactcagggcagtagagggaggctctcagaccctactaggagtggaggtgaggaccaagcagtctcctcacccagggtacatggacttcaataaatttggacatctctcgttgtcctttccgggaggacctgggaatgtatggccagatgtgggtcccctcatgtttttctgtaccatatcaggtatgtgagttcttgacatgagagattctcaggccagcagaagggagggattaggccctataaggagaaaggtgagggccctgagtgagcacagaggggatcctccaccccagtagagtggggacctcacagagtctggccaaccctcctgacagttctgggaatccgtggctgcgtttgctgtctgcacattgggggcccgtggattcctctcccaggaatcaggagctccaggaacaaggcagtgaggacttggtctgaggcagtgtcctcaggtcacagagtagagggggctcagatagtgccaacggtgaaggtttgccttggattcaaaccaagggccccacctgccccagaacacatggactccagagcgcctggcctcaccctcaatactttcagtcctgcagcctcagcatgcgctggccggatgtaccctgaggtgccctctcacttcctccttcaggttctgaggggacaggctgacctggaggaccagaggcccccggaggagcactgaaggagaagatctgtaagtaagcctttgttagagcctccaaggttccattcagtactcagctgaggtctctcacatgctccctctctccccaggccagtgggtctccattgcccagctcctgcccacactcccgcctgttgccctgaccagagtcatcatgcctcttgagcagaggagtcagcactgcaagcctgaagaaggccttgaggcccgaggagaggccctgggcctggtgggtgcgcaggctcctgctactgaggagcaggaggctgcctcctcctcttctactctagttgaagtcaccctgggggaggtgcctgctgccgagtcaccagatcctccccagagtcctcagggagcctccagcctccccactaccatgaactaccctctctggagccaatcctatgaggactccagcaaccaagaagaggaggggccaagcaccttccctgacctggagtctgagttccaagcagcactcagtaggaaggtggccaagttggttcattttctgctcctcaagtatcgagccagggagccggtcacaaaggcagaaatgctggggagtgtcgtcggaaattggcagtacttctttcctgtgatcttcagcaaagcttccgattccttgcagctggtctttggcatcgagctgatggaagtggaccccatcggccacgtgtacatctttgccacctgcctgggcctctcctacgatggcctgctgggtgacaatcagatcatgcccaagacaggcttcctgataatcatcctggccataatcgcaaaagagggcgactgtgcccctgaggagaaaatctgggaggagctgagtgtgttagaggtgtttgaggggagggaagacagtatcttcggggatcccaagaagctgctcacccaatatttcgtgcaggaaaactacctggagtaccggcaggtccccggcagtgatcctgcatgctatgagttcctgtggggtccaagggccctcattgaaaccagctatgtgaaagtcctgcaccatatggtaaagatcagtggaggacctcgcatttcctacccactcctgcatgagtgggctttgagagagggggaagagtgagtctgagcacgagttgcagccagggccagtgggagggggtctgggccagtgcaccttccggggccccatcccttagtttccactgcctcctgtgacgtgaggcccattcttcactctttgaagcgagcagtcagcattcttagtagtgggtttctgttctgttggatgactttgagattattctttgtttcctgttggagttgttcaaatgttccttttaacggatggttgaatgagcgtcagcatccaggtttatgaatgacagtagtcacacatagtgctgtttatatagtttaggagtaagagtcttgttttttactcaaattgggaaatccattccattttgtgaattgtgacataataatagcagtggtaaaagtatttgcttaaaattgtgagcgaattagcaataacatacatgagataactcaagaaatcaaaagatagttgattcttgccttgtacctcaatctattctgtaaaattaaacaaatatgcaaaccaggatttccttgacttctttgagaatgcaagcgaaattaaatctgaataaataattcttcctcttcactggctcgtttcttttccgttcactcagcatctgctctgtgggaggccctgggttagtagtggggatgctaaggtaagccagactcacgcctacccatagggctgtagagcctaggacctgcagtcatataattaaggtggtgagaagtcctgtaagatgtagaggaaatgtaagagaggggtgagggtgtggcgctccgggtgagagtagtggagtgtcagtgc

SEQ ID NO: 230 - DNA, 2053 bp, Homo sapiens
  misc_feature: Incyte ID No: 406438.14
gagaaagcagggactcttcggcctaggcagccgggacccagccagccctgcgcctcgcgccgtcgcgcatgcgtcctgggtatgtccacgcgcaataaggaggggcgaaaggacatttttttttttcttgctcccgcctctgttcttcccccacctgccacgtacagagcccaagttctcgctaggcttgttgggtcagcgcgattggccggggcccgcgcgagcctgcgagcgaggtgcggcggtcgcgaagggcaaccgagggggccgtgaccaccgcctccccgcgacgccccagtccagtggcctcgcgtccgcccattcagcggagacctgcggagaggcggcggccgcggcctccgcaagccgtctttctctagagttgtatatatagaacatcctggagtccaccatgaacggacagttggatctaagtgggaagctaatcatcaaagctcaacttggggaggatattcggcgaattcctattcataatgaagatattacttatgatgaattagtgctaatgatgcaacgagttttcagaggaaaacttctgagtaatgatgaagtaacaataaagtataaagatgaagatggagatcttataacaatttttgatagttctgacctttcctttgcaattcagtgcagtaggatactgaaactgacattatttgttaatggccagccaagaccccttgaatcaagtcaggtgaaatatctccgtcgagaactgatagaacttcgaaataaagtgaatcgtttattggatagcttggaaccacctggagaaccaggaccttccaccaatattcctgaaaatgatactgtggatggtagggaagaaaagtctgcttctgattcttctggaaaacagtctactcaggttatggcagcaagtatgtctgcttttgatcctttaaaaaaccaagatgaaatcaataaaaatgttatgtcagcgtttggcttaacagatgatcaggtttcagggccacccagtgctcctgcagaagatcgttcaggaacacccgacagcattgcttcctcctcctcagcagctcacccaccaggcgttcagccacagcagccaccatatacaggagctcagactcaagcaggtcagattgaaggtcagatgtaccaacagtaccagcaacaggccggctatggtgcacagcagccgcaggctccacctcagcagcctcaacagtatggtattcagtattcagcaagctatagtcagcagactggaccccaacaacctcagcagttccagggatatggccagcaaccaacttcccaggcaccagctcctgccttttctggtcagcctcaacaactgcctgctcagccgccacagcagtaccaggcgagcaattatcctgcacaaacttacactgcccaaacttctcagcctactaattatactgtggctcctgcctctcaacctggaatggctccaagccaacctggggcctatcaaccaagaccaggttttacttcacttcctggaagtaccatgacccctcctccaagtgggcctaatccttatgcgcgtaaccgtcctccctttggtcagggctatacccaacctggacctggttatcgataaggaggctcctctacaccaattaatgtagctgctagctattggcctcccaaaagactccagtactattttaatttgtattgaagaagttcagaaatttaaaagcagagcattttttatgatatcattgttggtgttaattgaaagtataatttgctggaacacaaagaccaaaatgaaagttttttcctccctgcttaaaaatgtagcagcttcttagttactttggaacactactcttacatgtataaagtgattgacttgactttctagcttcccttgtccggaggatattaaaatgctagggtgaggtttagccatcttacttggctttttactattaacatgatgtactaaagtagagccctttgagaatacaagatattatgtataaaatgtaacactgatgataggttaataaagatgattgaatccaaaaaa

SEQ ID NO: 231 - DNA, 1290 bp, Homo sapiens
  misc_feature: Incyte ID No: 1471808CB1
gcccaggctcggtgaggaggcaagtcctgcagcctcagcatgcgctggccggatgtaccctgaggtgccctctcacttcctccttcaggttctgaggggacaggctgacctggaggaccagaggcccccggaggagcactgaaggagaagatctgccagtgggtctccattgcccagctcctgcccacactcccgcctgttgccctgaccagagtcatcatgcctcttgagcagaggagtcagcactgcaagcctgaagaaggccttgaggcccgaggagaggccctgggcctggtgggtgcgcaggctcctgctactgaggagcaggaggctgcctcctcctcttctactctagttgaagtcaccctgggggaggtgcctgctgccgagtcaccagatcctccccagagtcctcagggagcctccagcctccccactaccatgaactaccctctctggagccaatcctatgaggactccagcaaccaagaagaggaggggccaagcaccttccctgacctggagtctgagttccaagcagcactcagtaggaaggtggccaagttggttcattttctgctcctcaagtatcgagccagggagccggtcacaaaggcagaaatgctggggagtgtcgtcggaaattggcagtacttctttcctgtgatcttcagcaaagcttccgattccttgcagctggtctttggcatcgagctgatggaagtggaccccatcggccacttgtacatctttgccacctgcctgggcctctcctacgatggcctgctgggtgacaatcagatcatgcccaagacaggcttcctgataatcatcctggccataatcgcaaaagagggcgactgtgcccctgaggagaaaatctgggaggagctgagtgtgttagaggtgtttgaggggagggaagacagtatcttgggggatcccaagaagctgctcacccaacatttcgtgcaggaaaactacctggagtaccggcaggtccccggcagtgatcctgcatgttatgaattcctgtggggtccaagggccctcgttgaaaccagctatgtgaaagtcctgcaccatatggtaaagatcagtggaggacctcgcatttcctacccactcctgcatgagtgggctttgagagagggggaagagtgagtctgagcacgagttgcagccagggccagtgggagggggtttgggccagtgcaccttccggggccccatcccttagtttccactgcctcctgtgacgtgaggccattcttcactctttgaaggagg

SEQ ID NO: 232 - DNA, 2493 bp, Homo sapiens
  misc_feature: Incyte ID No: 245595.1
  unsure 2476: a, t, c, g, or other
ggcgcgcgaggccctgcagtccgggttggcgcttgggtactggctgggtccgatgctgggtacgctgcgcgccatggagggcgaggacgtggaagacgaccagctgctgcagaagctcagggccagtcgccgccgcttccagaggcgcatgcagcggctgatagagaagtacaaccagcccttcgaggacaccccggtggtgcaaatggccacgctgacctacgagacgccacagggattgagaatttggggtggaagactaataaaggaaagaaacgaaggagagatccaggactcctccatgaagcccgcggacaggacagatggctccgtgcaagctgcagcctggggtcctgagcttccctcgcaccgcacagtcctgggagccgattcaaaaagcggtgaggtcgatgccacgtcagaccaggaagagtcagttgcttgggccttagcacctgcagtgcctcaaagccctttgaaaaatgaattaagaaggaaatacttgacccaagtggatatactgctacaaggtgcagagtattttgagtgtgcaggtaacagagctggaagggatgtacgtgtgactccgctgccttcactggcctcacctgccgtgcctgcccccggatactgcagtcgtatctccagaaagagtcctggtgacccagcgaaaccagcttcatctcccagagaatgggatcctttgcatccttcctccacagacatggccttagtacctagaaatgacagcctctccctacaagagaccagtagcagcagcttcttaagcagccagccctttgaagatgatgacatttgcaatgtgaccatcagtgacctgtacgcagggatgctgcactccatgagccggctgttgagcacaaagccatcaagcatcatctccaccaaaacgttcatcatgcaaaactggaactgcaggaggaggcacagatataagagcaggatgaacaaaacatattgcaaaggagccagacgttctcagaggagctccaaggagaacttcataccctgctctgagcctgtgaaagggacaggggcattaagagattgcaagaacgtattagatgtttcttgccgtaagacaggtttaaaattggaaaaagcttttcttgaagtcaacagaccccaaatccataagttagatccaagttggaaggagcgcaaagtgacaccctcgaagtattcttccttgatttacttcgactccagtgcaacatataatcttgatgaggaaaatagatttaggacattaaaatggttaatttctcctgtaaaaatagtttccagaccaacaatacgacagggccatggagagaaccgtcagagggagattgaaatccgatttgatcagcttcatcgggaatattgcctgagtcccaggaaccagcctcgccggatgtgcctcccggactcctgggccatgaacatgtacagagggggtcctgcgagtcctggtggccttcagggcttagaaacccgcaggctgagtttaccttccagcaaagcaaaagcaaaaagtttaagtgaggcttttgaaaacctaggcaaaagatctctggaagcaggtaggtgcctgcccaagagcgattcatcttcatcacttccaaagaccaaccccacacacagcgcaactcgcccgcagcagacatctgaccttcacgttcagggaaatagttctggaatatttagaaagtcagtgtcacccagcaaaactctttcagtcccagataaagaagtgccaggccacggaaggaatcgttacgatgaaattaaagaagaatttgacaagcttcatcaaaagtattgcctcaaatctcctgggcagatgacagtgcctttatgtattggagtgtctacagataaagcaagtatggaagttcgatatcaaacagaaggcttcttaggaaaattaaatccagaccctcacttccagggtttccagaagttgccatcatcacccctggggtgcagaaaaagtctactgggctcaactgcaattgaggctccttcatctacatgtgttgctcgtgccatcacgagggatggcacgagggaccatcagttccctgcaaaaagacccaggctatcagaaccccagggctccggacgccagggcaattccctgggtgcctcagatggggtggacaacaccgtcagaccgggagaccagggcagctcttcacagcccaactcagaagagagaggagagaacacgtcttacaggatggaagagaaaagtgatttcatgctagaaaaattggaaactaaaagtgtgtagctaggttatttcggagtgttatttatcttcccacttgctctctgtttgtatttttgttttgtttttgattcttgagactgtgaggacttggttgacttctctgcccttaaagtaaatattagtgaaattggttccatcagagataacctcgagttcttggtgtagaaattatgtgantaaagttgctcaattag

SEQ ID NO: 233 - DNA, 1818 bp, Homo sapiens
  misc_feature: Incyte ID No: 2784232CB1
tcccaatcagtttccagccaacaccagggtgtcctagtccgcagaggtgtgggggacacactccataatctctacttttctttttgtgcagctgagtcatggagctttcagccccagcacatggctcctccttaactgcgtctgctcaacctccctcagccctgtgaacagcatccccgcacacagacgcagagcaggactctctctgctgccacttcaccttcctgagagaggaccagcggccagagcctcagtgactgccaccctggaggacagggcacaacaaccgtttctggagagaatgggaggattccagaggggcaaatatggaactatggctgaaggtagatcagaagataacttgtctgcaacaccaccggcattgaggattatcctagtgggcaaaacaggctgcgggaaaagtgccacagggaacagcatccttggccagcccgtgtttgagtccaagctgagggcccagtcagtgaccaggacgtgccaggtgaaaacaggaacatggaacgggaggaaagtcctggtggttgacacgccctccatctttgagtcacaggccgatacccaagagctgtacaagaacatcggggactgctacctgctctctgccccggggccccacgtcctgcttctggtgatccagctggggcgtttcactgctcaggacacagtggccatcaggaaggtgaaagaggtctttgggacaggggccatgagacatgtggtcatcctcttcacccacaaagaggacttagggggccaggccctggatgactatgtagcaaacacggacaactgcagcctgaaagacctggtgcgggagtgtgagagaaggtactgtgccttcaacaactggggctctgtggaggagcagaggcagcagcaggcagagctcctggctgtgattgagaggctggggagggagcgagagggctccttccacagcaatgacctcttcttggatgcccagctgctccaaagaactggagctggggcctgccaggaagactacaggcagtaccaggccaaagtggaatggcaggtggagaagcacaagcaagagctgagggagaacgagagtaactgggcatacaaggcgctcctcagagtcaaacacttgatgcttttgcattatgagatttttgtttttctattgttgtgcagcatactttttttcattatttttctgttcatctttcattacatttaaatctctggaccctggagcacttctaatgtatcaccccatggagtcattgttctaataatcaccaattcagactcagatcctcgtggtctatggagcatgctgcttgctgtctgtgcagctcccatttccccttcttcctgatagacttggagctgtgtgcctccactccaaggctgcctgcctgctgtaaacactattccactctgtctgccaacaactgcttcaggaatgggcctgagatcccatgcaggtccctgagaagtgagtaaaagtccgcagaggtggggatggaagatctctccttagatagaacctgtcttcctccctggcattgtggggtctgggcgtgacactgggactctcagcagctttgtgctgccaacctgagattgaaggcagtgcctcagagcagcacagagagttggggccccctgagccctgagccaccagccctgcagcctgccctatctccgcatttccagttgtattagccaatagatttcctacttatttaagctatttgagctccgggtctcttctacctgcattctaaaacattcaaagtaataaaaatttctccacaaaaaaaaaaa

SEQ ID NO: 234 - DNA, 1759 bp, Homo sapiens
  misc_feature: Incyte ID No: 2742913CB1
cacactgacgaggccatgattgaatttaggtgacctatagacgcgctgtaactacgctcggaattcggctcgaggtcacctcctccccttgtcgcctaggtccacccgagccccctcccccgggccgcccacgagcacgaagttggcgggagcctataaaagctggtgccggcgcgacccgcggacacacagtgcaggcgcccaagccgccgccgccagatcggtgccgattcctgccctgccccgaccgccagcgcgaccatgtcccatcactgggggtacggcaaacacaacggacctgagcactggcataaggacttccccattgccaagggagagcgccagtcccctgttgacatcgacactcatacagccaagtatgacccttccctgaagcccctgtctgtttcctatgatcaagcaacttccctgaggatcctcaacaatggtcatgctttcaacgtggagtttgatgactctcaggacaaagcagtgctcaagggaggacccctggatggcacttacagattgattcagtttcactttcactggggttcacttgatggacaaggttcagagcatactgtggataaaaagaaatatgctgcagaacttcacttggttcactggaacaccaaatatggggattttgggaaagctgtgcagcaacctgatggactggccgttctaggtatttttttgaaggttggcagcgctaaaccgggccttcagaaagttgttgatgtgctggattccattaaaacaaagggcaagagtgctgacttcactaacttcgatcctcgtggcctccttcctgaatccttggattactggacctacccaggctcactgaccacccctcctcttctggaatgtgtgacctggattgtgctcaaggaacccatcagcgtcagcagcgagcaggtgttgaaattccgtaaacttaacttcaatggggagggtgaacccgaagaactgatggtggacaactggcgcccagctcagccactgaagaacaggcaaatcaaagcttccttcaaataagatggtcccatagtctgtatccaaataatgaatcttcgggtgtttccctttagctaagcacagatctaccttggtgatttggaccctggttgctttgtgtctagttttctagacccttcatctcttacttgatagacttactaataaaatgtgaagactagaccaattgtcatgcttgacacaactgctgtggctggttggtgctttgtttatggtagtagtttttctgtaacacagaatataggataagaaataagaataaagtaccttgactttgttcacagcatgtagggtgatgagcactcacaattgttgactaaaatgctgcttttaaaacataggaaagtagaatggttgagtgcaaatccatagcacaagataaattgagctagttaaggcaaatcaggtaaaatagtcatgattctatgtaatgtaaaccagaaaaaataaatgttcatgatttcaagatgttatattaaagaaaaactttaaaaattattatatatttatagcaaagttatcttaaatatgaattctgttgtaatttaatgacttttgaattacagagatataaatgaagtattatctgtaaaaattgttataattagagttgtgatacagagtatatttccattcagacaatatatcataacttaataaatattgtattttagatatattctctaataaaattcagaattctaaaaaaaaaaaa

SEQ ID NO: 235 - DNA, 1399 bp, Homo sapiens
  misc_feature: Incyte ID No: 1509972CB1
ggtgccatggctgagtcacacctgctgcagtggctgctgctgctgctgcccacgctctgtggcccaggcactgctgcctggaccacctcatccttggcctgtgcccagggccctgagttctggtgccaaagcctggagcaagcattgcagtgcagagccctagggcattgcctacaggaagtctggggacatgtgggagccgatgacctatgccaagagtgtgaggacatcgtccacatccttaacaagatggccaaggaggccattttccaggacacgatgaggaagttcctggagcaggagtgcaacgtcctccccttgaagctgctcatgccccagtgcaaccaagtgcttgacgactacttccccctggtcatcgactacttccagaaccagattgactcaaacggcatctgtatgcacctgggcctgtgcaaatcccggcagccagagccagagcaggagccagggatgtcagaccccctgcccaaacctctgcgggaccctctgccagaccctctgctggacaagctcgtcctccctgtgctgcccggggccctccaggcgaggcctgggcctcacacacaggatctctccgagcagcaattccccattcctctcccctattgctggctctgcagggctctgatcaagcggatccaagccatgattcccaagggtgcgctagctgtggcagtggcccaggtgtgccgcgtggtacctctggtggcgggcggcatctgccagtgcctggctgagcgctactccgtcatcctgctcgacacgctgctgggccgcatgctgccccagctggtctgccgcctcgtcctccggtgctccatggatgacagcgctggcccaaggtcgccgacaggagaatggctgccgcgagactctgagtgccacctctgcatgtccgtgaccacccaggccgggaacagcagcgagcaggccataccacaggcaatgctccaggcctgtgttggctcctggctggacagggaaaagtgcaagcaatttgtggagcagcacacgccccagctgctgaccctggtgcccaggggctgggatgcccacaccacctgccaggccctcggggtgtgtgggaccatgtccagccctctccagtgtatccacagccccgacctttgatgagaactcagctgtccagaaaaagacaccgtcctttaaagtgctgcagtatggccagacgtggtggctcacacctgcaatcccagcaccttaggaggccgaggcaggaggatccttgaggtcaggagttcgagaccagcctcgccaacatggtgaaacccatttctactaagaatacaaaatattagcaagtgtggtgggataatgctgtaatcccaactactcagaaagccgaagcaggagaatt

SEQ ID NO: 236 - DNA, 611 bp, Homo sapiens
  misc_feature: Incyte ID No: 1097638.1
gaaaataaataaatcctccagtctggatcgtttgacgggacttcaggttctttctgaaatcgccgtgttactgttgcactgatgtccggagagacagtgacagcctccgtcagactcccgcgtgaagatgtcacaagggattggcaattgtccccagggacaaaacactgtgtcccccccagtgcagggaaccgtgataagcctttctggtttcggagcacgtaaatgcgtccctgtacagatagtggggattttttgttatgtttgcactttgtatattggttgaaactgttatcacttatatatatatatacacacatatatataaaatctatttatttttgcaaaccctggttgctgtatttgttcagtgactattctcggggccctgtgtagggggttattgcctctgaaatgcctcttctttatgtacaaagattatttgcacgaactggactgtgtgcaacgctttttgggagaatgatgtccccgttgtatgtatgagtggcttctgggagatgggtgtcactttttaaaccactgtatagaaggtttttgtagcctgaatgtcttactgtgatcaattaaatttcttaaatgaaccaatttgt

SEQ ID NO: 237 - DNA, 6739 bp, Homo sapiens
  misc_feature: Incyte ID No: 900035.58
  unsure 4764, 5544, 5546: a, t, c, g, or other
agcagacgggagtttctcctcggggtcggagcaggaggcacgcggagtgtgaggccacgcatgagcggacgctaaccccctccccagccacaaagagtctacatgtctagggtctagacatgttcagctttgtggacctccggctcctgctcctcttagcggccaccgccctcctgacgcacggccaagaggaaggccaagtcgagggccaagacgaagacatcccaccaatcacctgcgtacagaacggcctcaggtaccatgaccgagacgtgtggaaacccgagccctgccggatctgcgtctgcgacaacggcaaggtgttgtgcgatgacgtgatctgtgacgagaccaagaactgccccggcgccgaagtccccgagggcgagtgctgtcccgtctgccccgacggctcagagtcacccaccgaccaagaaaccaccggcgtcgagggacccaagggagacactggcccccgaggcccaaggggacccgcaggcccccctggccgagatggcatccctggacagcctggacttcccggaccccccggaccccccggacctcccggaccccctggcctcggaggaaactttgctccccagctgtcttatggctatgatgagaaatcaaccggaggaatttccgtgcctggccccatgggtccctctggtcctcgtggtctccctggcccccctggtgcacctggtccccaaggcttccaaggtccccctggtgagcctggcgagcctggagcttcaggtcccatgggtccccgaggtcccccaggtccccctggaaagaatggagatgatggggaagctggaaaacctggtcgtcctggtgagcgtgggcctcctgggcctcagggtgctcgaggattgcccggaacagctggcctccctggaatgaagggacacagaggtttcagtggtttggatggtgccaagggagatgctggtcctgctggtcctaagggtgagcctggcagccctggtgaaaatggagctcctggtcagatgggcccccgtggcctgcctggtgagagaggtcgccctggagcccctggccctgctggtgctcgtggaaatgatggtgctactggtgctgccgggccccctggtcccaccggccccgctggtcctcctggcttccctggtgctgttggtgctaagggtgaagctggtccccaagggccccgaggctctgaaggtccccagggtgtgcgtggtgagcctggcccccctggccctgctggtgctgctggccctgctggaaaccctggtgctgatggacagcctggtgctaaaggtgccaatggtgctcctggtattgctggtgctcctggcttccctggtgcccgaggcccctctggaccccagggccccggcggccctcctggtcccaagggtaacagcggtgaacctggtgctcctggcagcaaaggagacactggtgctaagggagagcctggccctgttggtgttcaaggaccccctggccctgctggagaggaaggaaagcgaggagctcgaggtgaacccggacccactggcctgcccggaccccctggcgagcgtggtggacctggtagccgtggtttccctggcgcagatggtgttgctggtcccaagggtcccgctggtgaacgtggttctcctggccctgctggccccaaaggatctcctggtgaagctggtcgtcccggtgaagctggtctgcctggtgccaagggtctgactggaagccctggcagccctggtcctgatggcaaaactggcccccctggtcccgccggtcaagatggtcgccccggacccccaggcccacctggtgcccgtggtcaggctggtgtgatgggattccctggacctaaaggtgctgctggagagcccggcaaggctggagagcgaggtgttcccggaccccctggcgctgtcggtcctgctggcaaagatggagaggctggagctcagggaccccctggccctgctggtcccgctggcgagagaggtgaacaaggccctgctggctcccccggattccagggtctccctggtcctgctggtcctccaggtgaagcaggcaaacctggtgaacagggtgttcctggagaccttggcgcccctggcccctctggagcaagaggcgagagaggtttccctggcgagcgtggtgtgcaaggtccccctggtcctgctggtccccgaggggccaacggtgctcccggcaacgatggtgctaagggtgatgctggtgcccctggagctcccggtagccagggcgcccctggccttcagggaatgcctggtgaacgtggtgcagctggtcttccagggcctaagggtgacagaggtgatgctggtcccaaaggtgctgatggctctcctggcaaagatggcgtccgtggtctgaccggccccattggtcctcctggccctgctggtgcccctggtgacaagggtgaaagtggtcccagcggccctgctggtcccactggagctcgtggtgcccccggagaccgtggtgagcctggtccccccggccctgctggctttgctggcccccctggtgctgacggccaacctggtgctaaaggcgaacctggtgatgctggtgctaaaggcgatgctggtccccctggccctgccggacccgctggaccccctggccccattggtaatgttggtgctcctggagccaaaggtgctcgcggcagcgctggtccccctggtgctactggtttccctggtgctgctggccgagtcggtcctcctggcccctctggaaatgctggaccccctggccctcctggtcctgctggcaaagaaggcggcaaaggtccccgtggtgagactggccctgctggacgtcctggtgaagttggtccccctggtccccctggccctgctggcgagaaaggatcccctggtgctgatggtcctgctggtgctcctggtactcccgggcctcaaggtattgctggacagcgtggtgtggtcggcctgcctggtcagagaggagagagaggcttccctggtcttcctggcccctctggtgaacctggcaaacaaggtccctctggagcaagtggtgaacgtggtccccctggtcccatgggcccccctggattggctggaccccctggtgaatctggacgtgagggggctcctggtgccgaaggttcccctggacgagacggttctcctggcgccaagggtgaccgtggtgagaccggccccgctggaccccctggtgctcctggtgctcctggtgcccctggccccgttggccctgctggcaagagtggtgatcgtggtgagactggtcctgctggtcccgccggtcctgtcggccctgttggcgcccgtggccccgccggaccccaaggcccccgtggtgacaagggtgagacaggcgaacagggcgacagaggcataaagggtcaccgtggcttctctggcctccagggtccccctggccctcctggctctcctggtgaacaaggtccctctggagcctctggtcctgctggtccccgaggtccccctggctctgctggtgctcctggcaaagatggactcaacggtctccctggccccattgggccccctggtcctcgcggtcgcactggtgatgctggtcctgttggtccccccggccctcctggacctcctggtccccctggtcctcccagcgctggtttcgacttcagcttcctgccccagccacctcaagagaaggctcacgatggtggccgctactaccgggctgatgatgccaatgtggttcgtgaccgtgacctcgaggtggacaccaccctcaagagcctgagccagcagatcgagaacatccggagcccagagggcagccgcaagaaccccgcccgcacctgccgtgacctcaagatgtgccactctgactggaagagtggagagtactggattgaccccaaccaaggctgcaacctggatgccatcaaagtcttctgcaacatggagactggtgagacctgcgtgtaccccactcagcccagtgtggcccagaagaactggtacatcagcaagaaccccaaggacaagaggcatgtctggttcggcgagagcatgaccgatggattccagttcgagtatggcggccagggctccgaccctgccgatgtggccatccagctgaccttcctgcgcctgatgtccaccgaggcctcccagaacatcacctaccactgcaagaacagcgtggcctacatggaccagcagactggcaacctcaagaaggccctgctcctccagggctccaacgagatcgagatccgcgccgagggcaacagccgcttcacctacagcgtcactgtcgatggctgcacgagtcacaccggagcctggggcaagacagtgattgaatacaaaaccaccaagacctcccgcctgcccatcatcgatgtggcccccttggacgttggtgccccagaccaggaattcggcttcgacgttggccctgtctgcttcctgtaaactccctccatcccaacctggctccctcccacccaaccaactttccccccaacccggaaacagacaagcaacccaaactgaaccccctcaaaagccaaaaaatgggagacaatttcacatggactttggaaaatatttttttcctttgcattcatctctcaaacttagtttttatctttgaccaaccgaacatgaccaaaaaccaaaagtgcattcaaccttaccaaaaaaaaaaaaaaaaataaaagantaaataaataactttttaaaaaaggaagcttggtccacttgcttgaagacccatgcgggggtaagtccctttctgcccgttgggcttatgaaaccccaatgctgccctttctgctcctttctccacaccccccttggggcctcccctccactccttcccaaatctgtctccccagaagacacaggaaacaatgtattgtctgcccagcaatcaaaggcaatgctcaaacacccaagtggcccccaccctcagcccgctcctgcccgcccagcacccccaggccctgggggacctggggttctcagactgccaaagaagccttgccatctggcgctcccatggctcttgcaacatctccccttcgtttttgagggggtcatgccgggggagccaccagcccctcactgggttcggaggagagtcaggaagggccaagcacgacaaagcagaaacatcggatttggggaacgcgtgtcaatcccttgtgccgcagggctgggcgggagagactgttctgttctgttccttgtgtaactgtgttgctgaaagactacctcgttcttgtcttgatgtgtcaccggggcaactgcctgggggcggggatgggggcagggtggaagcggctccccattttataccaaaggtgctacatctatgtgatgggtggggtggggagggaatcactggtgctatagaaattgagatgcccccccaggccagcaaatgttcctttttgttcaaagtctatttttattccttgatatttttctttcttttttntntttttgtggatggggacttgtgaattttcctaaaggtgctatttaacatgggaggagagcgtgtgcggctccagcccagcccgctgctcattttccaccctctctccacctgcctcgtggtttctcaggcctctgctctccgacctctctcctttgaaaccctcctccacagctggagcccatcctcccggttccctcctagtctgtcctgcgtcctctgtccccgggtttcagagacaatttcccaaagcacaaagcagttttcccccctgggggtgggaggaagcaaaagacgctgtacctattttgtatgtgtataataatttgagatgtttttaattattttgattgctggaataaagcatgtggaaatgacccaaacataatccgcagttgcctcctaatttccttctttggagttgggggaggggtagacatggggaaggggccttggggtgatgggcttgccttccattcctgccctttccctccccactattctcttctagatccctccataaccccactcccctttctctcacccttcttataccgcaaacctttctgcttcctctttcattttctattcttgcaatttccttgcaccttttccaaatcctcttctcccctgcaataccatacaggcaatccacgtgcacaacacacacacacactcttcacatctggggttgtccaaacctcatacccactccccttcaagcccatccactctccaccccctggatgccctgcacttggtggcggtgggatgctcatggatactgggagggtgaggggagtggaacccgtgaggaggacctgggggcctctccttgaactgacatgaagggtcatctggcctctgctcccttctcacccacgctgacctcctgccgaaggagcaacgcaacaggagaggggtgtgctgagcctggcgagggtctgggagggaccaggaggaaggcgtgctccctgctcgctgtcctggccctgggggagtgagggagacagacacctgggagagctgtggggaatgcactcgcaccgtgctcttgggaaggaaggagacctggccctgctcaccacggactgggtgcctcgacctcctgaatccccagaacacaacccccctgggttgggggggtctggggaaccatcgtgcccccgcctcccgcctactcctttttaagctt

SEQ ID NO: 238 - DNA, 5511 bp, Homo sapiens
  misc_feature: Incyte ID No: 1075592.6
  unsure 5496: a, t, c, g, or other
aaacttctgcaggggaaaagagctaggaaagagctgcaaagcaggtgtgggctttttcccttttttgctccttttcattacccctcctccgttttcacccttctccggacttcgcgtagaacctgcgaatttcgaagaggaggtggcaaagtgggagaaaagaggtgttagggtttggggtttttttgtttttgtttttgttttttaatttcttgatttcaacattttctcccaccctctcggctgcagccaacgcctcttacctgttctgcggcgccgcgcaccgctggcagctgagggttagaaagcggggtgtattttagattttaagcaaaaattttaaagataaatccatttttctctcccacccccaacgccatctccactgcatccgatctcattatttcggtggttgcttgggggtgaacaattttgtggctttttttcccctataattctgacccgctcaggcttgagggtttctccggcctccgctcactgcgtgcacctggcgctgccctgcttcccccaacctgttgcaaggctttaattcttgcaactgggacctgctcgcaggcaccccagccctccacctctctctacatttttgcaagtgtctgggggagggcacctgctctacctgccagaaattttaaaacaaaaacaaaaacaaaaaaatctccgggggccctcttggcccctttatccctgcactctcgctctcctgccccaccccgaggtaaagggggcgactaagagaagatggtgttgctcaccgcggtcctcctgctgctggccgcctatgcggggccggcccagagcctgggctccttcgtgcactgcgagccctgcgacgagaaagccctctccatgtgcccccccagccccctgggctgcgagctggtcaaggagccgggctgcggctgctgcatgacctgcgccctggccgaggggcagtcgtgcggcgtctacaccgagcgctgcgcccaggggctgcgctgcctcccccggcaggacgaggagaagccgctgcacgccctgctgcacggccgcggggtttgcctcaacgaaaagagctaccgcgagcaagtcaagatcgagagagactcccgtgagcacgaggagcccaccacctctgagatggccgaggagacctactcccccaagatcttccggcccaaacacacccgcatctccgagctgaaggctgaagcagtgaagaaggaccgcagaaagaagctgacccagtccaagtttgtcgggggagccgagaacactgcccacccccggatcatctctgcacctgagatgagacaggagtctgagcagggcccctgccgcagacacatggaggcttccctgcaggagctcaaagccagcccacgcatggtgccccgtgctgtgtacctgcccaattgtgaccgcaaaggattctacaagagaaagcagtgcaaaccttcccgtggccgcaagcgtggcatctgctggtgcgtggacaagtacgggatgaagctgccaggcatggagtacgttgacggggactttcagtgccacaccttcgacagcagcaacgttgagtgatgcgtccccccccaacctttccctcaccccctcccacccccagccccgactccagccagcgcctccctccaccccaggacgccactcatttcatctcatttaagggaaaaatatatatctatctatttgaggaaactgaggacctcggaatctctagcaagggctcaacttcgaaaatggcaacaacagagatgcaaaaagctaaaaagacaccccccccctttaaatggttttctttttgaggcaagttggatgaacagagaagggaagagaggaagaacgagaggaagagaagggaaggaagtgtttgtgtagaagagagagaaagacgaatagagttaggaaaaggaagacaagcaggtgggcaggaaggacatgcaccgagaccaggcaggggcccaactttcacgtccagccctggcctggggtcgggagaggtgggcgctagaagatgcagcccaggatgtggcaatcaatgacactattggggtttcccaggatggattggtcagggggagaaaggaaaaggcaaaacactccaggacctctcccggatctgtctcctcctctagccagcagtatggacagctggacccctgaacttcctctcctcttacctgggcagagtgttgtctctccccaaatttataaaaactaaaatgcattccattcctctgaaagcaaaacaaattcataattgagtgatattaaatagagaggttttcggaagcagatctgtgaatatgaaatacatgtgcatatttcattccccaggcagacattttttagaaatcaatacatgccccaatattggaaagacttgttcttccacggtgactacagtacatgctgaagcgtgccgtttcagccctcatttaattcaatttgtaagtagcgcagcagcctctgtgggggaggataggctgaaaaaaaaaagtgggctcgtatttatctacaggactccatatagtcatatataggcatataaatctattctttttctttgtttttttctttcttcctttctttcaaaggtttgcattaacttttcaaagtagttcctataggggcattgaggagcttcctcattctgggaaaactgagaaaacccatattctcctaatacaacccgtaatagcatttttgcctgcctcgaggcagagtttcccgtgagcaataaactcagcttttttgtggggcacagtactggatttgacagtgattccccacgtgtgttcatctgcacccaccgagccaggcagaggccagccctccgtggtgcacacagcacgcgcctcagtccatcccattttagtctttaaaccctcaggaagtcacagtctccggacaccacaccacatgagcccaacaggtccacgatggatccaccagtcccaccccagccttttcctttcatctgaacagaatgtgcatttttggaagcctccctcactctccatgctggcagagcaggagggagactgaagtaagagatggcagagggagatggtggcaaaaaggtttagatgcaggagaacagtaagatggatggttccggccagagtcgatgtggggaggaacagagggctgaagggagagggggctgactgttccattctagctttggcacaaagcagcagaaagggggaaaagccaatagaaatttccttagcttccccaccatatgtattttctaggatttgagaggaaagagaggaaaatgggggaatgggttgcaaaatagaaatgagcttaatccaggccgcagagccagggaaggtgagtaactttaggagggtgctagactttagaagccagataggaagaatcagtctaaactggccatgctttggaagggacaagactatgtgctccgctgcccaccttcagcctgcaatgagggactgaggcccacgagtctttccagctcttcctccattctggccagtccctgcatcctccctggggtggaggatggaaggaaagctgggacaagcagggaacgcatgattcagggatgctgtcactcggcagccagattccgaaactcccattctccaatgacttcctcaaccaatgggtggccttgtgactgttctttaaggctgaagatatccaggaaagggggcttggacactggccaaggagaccccttcgtgctgtggacacagctctcttcactctttgctcatggcatgacacagcggagaccgcctccaacaacgaatttggggctacgaagaggaatagcgaaaaagcaaatctgtttcaactgatgggaaccctatagctatagaacttgggggctatctcctatgcccctggacaggacagttggctggggacaggagaagtgctcaatcttcatgagacaaaggggcccgatagggccagcagccacaaggccttgacctgccgagtcagcatgccccatctctctgcacagctgtcccctaaacccaactcacgtttctgtatgtcttaggccagtatcccaaacctcttccacgtcactgttctttccacccattctccctttgcatcttgagcagttatccaactaggatctgccaagtggatactggggtgccactcccctgagaaaagactgagccaggaactacaagctccccccacattcctcccagcctggacctaattcttgagaggggctctctcttcacggactgtgtctggactttgagcaggcttctgccccttgcgttggctctttgctgccagccatcaggtgggggattagagcctggtgtaagtgcgccagactcttccggtttccaaagttcgtgcctgcgaacccaaacctgtgagtctcttctgcatgcaggagtttctcctgggcagctggtcactccccagagaagctgggccttcatggacacatggaactaagcctcccaaatgggagttctggctgagcccagggtggggagatcctgggaagggaggcactggaggaagacggcacctcttcccccatggcagggtgtgagggaggcaggtttggaatggtgcgagtatggcaatctaagcaggggtctggtctctttgactccaggctggcctttggccgactgtctgctcacccagagaccttggactccggactatccatggctccgaatctaagtgctgcccactcccatgctcacacccacagaaggtcttcccatcccctttagattcgtgcctcactccaccagtgaggaagatgcctctgtctttcccacgactgccaggagatagggaagcccagccaggactgaccctccttcctccagcctgccctgacccacctggcaaagcagggcacatggggaggaagagactggaacctttctttgacagccaggcctagacagacaggcctggggacactggccccatgaggggaggaaggcaggcgcacgaggtccagggaggcccttttctgatcatgccccttctctcccaccccatctccccaccaccacctctgtggcctccatggtacccccacagggctggcctcccctagagggtgggcctcaaccacctgctcccgccacgcaccggttagtgagacagggctgccacggcaaccgccaagcccccctcaaggtgggacagtaccccggacccatccactcactcctgagagggctccggcccagaatgggaacctcagagaagagctctaaggagaagaaaccccatagcgtcagagaggatatgtctggcttccaagagaaaggaggctccgttttgcaaagtggaggagggacgagggacaggggtttcaccagccagcaacctgggcctgtactgtctgtgtttttaaaaccactaaagtgcaagaatacattgcactgtttctccacttttatttccttagctttgttctattcaacatacttntggttctatgagata

SEQ ID NO: 239 - DNA, 2519 bp, Homo sapiens
  misc_feature: Incyte ID No: 984540.1
cgctgccgctgccgcggttctcctagcagcgcgggccggtcggaccgccaaggcagccggcgctggcgatgggaagcggcgtggccgccgacacaggcagtggcaaagtttcccagacgtacacatctggacgcgcggctgccggctacccgtgacccctctaggaagggttcagggatttttaatttggaaaaaaatccacctggtttcctttgtcaaggtctctccgggtggccagcggcaggagctgcaaacttgggcacggcggctacaccggcagcggaccgggctttggagaacctcgggactcaggtgctgaggtgcccagcggctccggacgtgctacggggtgcgagcgcgggggagttcggggcgcacgacaaggaagggcccccgggagctctatatggaggaaggagcccagaatggtgtgcaccaggaagaccaaaactttggtgtccacttgcgtgatcctgagcggcatgactaacatcatctgcctgctctacgtgggctgggtcaccaactacatcgccagcgtgtatgtgcgggggcaggagcccggcgccagacaagaagctggaggaagacaaaggggacactctgaagattattgagcggctggaccacctggagaatgtcatcaagcagcacattcaagaggctcctgccaagcctgaggaggcagaggccgagcccttcacagactcctctctgtttgcacactggggccaggagctcagccccgaaggccggcgcgtggccctgaagcaattccagtactacggctacaacgcctacctcagcgaccgcctgcccctggaccggcccctgcctgacctcagacccagtgggtgccgtaacctctcatttcctgacagcctgccagaggtgagcatcgtgttcatcttcgtcaatgaagcgctttcagtgctgctgcgctccatccactcggccatggaacgcacgcccccacatctgctcaaggagatcattctggtggatgacaacagcagtaacgaggaactgaaggagaagctgaccgaatatgtggacaaggtgaacagccagaagccaggcttcatcaaagtcgtgcgtcacagcaagcaggaaggcctcatccgctccagggtcagtggctggagggcggccactgcccctgtggtggcactctttgatgcccacgtggagttcaatgtgggctgggctgaacctgtactcacccgcatcaaggagaaccggaagcggatcatctcgccatcctttgataacatcaaatatgacaactttgagatagaagagtacccgctggctgcccagggctttgactgggagctgtggtgccgctacctaaatccccccaaggcctggtggaagctggagaactccacagcgccaatcaggagccctgccctcattggctgcttcattgtggaccggcagtacttccaggagatcggcctgctggacgaaggcatggaagtctacgggggcgagaatgtggagcttgggatcagggtgtggcagtgtggcgggagtgtggaggtcctgccctgctcacggattgcccacattgagcgagcccacaagccctacacagaggacctcaccgcccatgtccgcaggaacgctctcagggtggctgaagtctggatggatgaatttaaaagccacgtctacatggcatggaacataccgcaggaggactcaggaattgacattggggacatcactgcaaggaaggctctcaggaaacagctgcagtgcaagaccttccggtggtacctggtcagcgtgtacccagagatgaggatgtactccgacatcattgcctatggagtgctgcagaattctctgaagactgatttgtgtcttgaccaggggccagatacagagaatgtccccatcatgtacatctgccatgggatgacgcctcagaacgtgtactacacgagcagtcagcagatccatgtgggcattctgagccccaccgtggatgatgatgacaaccgatgcctggtggacgtcaacagccggccccggctcatcgaatgcagctacgccaaagccaagaggatgaagcttcactggcagttctctcagggaggacccatccagaaccgcaagtctaagcgctgtctggagctgcaggagaatagcgacctggagttcggcttccagctggtgttgcagaagtgctcgggccagcactggagcatcaccaacgtcctgaggagcctcgcgtcctgacccaccggggccacttccggctgcctctttgctactgtgtagcacctgctgcaacgttgcctgctgtccacgtggggttgtttggagtctggggaaccaggttagtgggcccccaagaagagctttttatttcctattcaattttcatggagtttatagaaagatgctgattggtaggtgatggtatgatatcaaactattttgcagttgtaaataggggacagatggaaaatatttataactgacaataaaatattattaagaaaagg

SEQ ID NO: 240 - DNA, 1158 bp, Homo sapiens
  misc_feature: Incyte ID No: 378633.40
ggaattccgtggccaggatgctgagcctgctgctgctggcgctgcccgtcctggcgagccgcgcctacgcggcccctgccccagtccaggccctgcagcaagcgggtatcgtcgggggtcaggaggcccccaggagcaagtggccctggcaggtgagcctgagagtccgcgaccgatactggatgcacttctgcgggggctccctcatccacccccagtgggtgctgaccgcggcgcactgcctgggaccggacgtcaaggatctggccaccctcagggtgcaactgcgggagcagcacctctactaccaggaccagctgctgccagtcagcaggatcatcgtgcacccacagttctacatcatccagactggagcggatatcgccctgctggagctggaggagcccgtgaacatctccagccgcgtccacacggtcatgctgccccctgcctcggagaccttccccccggggatgccgtgctgggtcactggctggggcgatgtggacaatgatgagcccctcccaccgccatttcccctgaagcaggtgaaggtccccataatggaaaaccacatttgtgacgcaaaataccaccttggcgcctacacgggagacgacgtccgcatcatccgtgacgacatgctgtgtgccgggaacagccagagggactcctgcaagggcgactctggagggcccctggtgtgcaaggtgaatggcacctggctacaggcgggcgtggtcagctgggacgagggctgtgcccagcccaaccggcctggcatctacacccgtgtcacctactacttggactggatccaccactatgtccccaaaaagccgtgagtcaggcctggggtgtccacctgggtcactggaggaccaacccctgctgtccaaaacaccactgcttcctacccaggtggcgactgccccccacaccttccctgccccgtcctgagtgccccttcctgtcctaagccccctgctctcttctgagccccttcccctgtcctgaggacccttccccatcctgagcccccttccctgtcctaagcctgacgcctgcactgggccctccggccctcccctgcccaggcagctggtggtgggcgctaatcctcctgagtgctggacctcattaaagtgcatggaaatc

SEQ ID NO: 241 - DNA, 1985 bp, Homo sapiens
  misc_feature: Incyte ID No: 477387.7
ccggacctcagcgtctcccggagtctggccgcagtcgcggcagtggtggcttcccatccccaaaaggcgccctccgactccttgcgccgcactgctcgccgggccagtccggaaacgggtcgtggagctccgcaccactcccgctggttcccgaaggcagatcccttctcccgagagttgcgagaaactttcccttgtccccgacgctgcagcggctcgggtaccgtggcagccgcaggtttctgaaccccgggccacgctccccgcgcctcggcttcgcgctcgtgtagatcgttccctctctggttgcacgctggggatcccggacctcgattctgcgggcgagatgcccctgggacacatcatgaggctggacctggagaaaattgccctggagtacatcgtgccctgtctgcacgaggtgggcttctgctacctggacaacttcctgggcgaggtggtgggcgactgcgtcctggagcgcgtcaagcagctgcactgcaccggggccctgcgggacggccagctggcggggccgcgcgccggcgtctccaagcgacacctgcggggcgaccagatcacgtggatcgggggcaacgaggagggctgcgaggccatcagcttcctcctgtccctcatcgacaggctggtcctctactgcgggagccggctgggcaaatactacgtcaaggagaggtctaaggcaatggtggcttgctatccgggaaatggaacaggttatgttcgccacgtggacaaccccaacggtgatggtcgctgcatcacctgcatctactatctgaacaagaattgggatgccaagctacatggtgggatcctgcggatatttccagaggggaaatcattcatagcagatgtggagcccatttttgacagactcctgttcttctggtcagatcgtaggaacccacacgaagtgcagccctcttacgcaaccagatatgctatgactgtctggtactttgatgctgaagaaagggcagaagccaaaaagaaattcaggaatttaactaggaaaactgaatctgccctcactgaagactgaccgtgctctgaaatctgctggccttgttcattttagtaacggttcctgaattctcttaaattctttgagatccaaagatggcctcttcagtgacaacaatctccctgctacttcttgcatccttcacatccctgtcttgtgtgtggtacttcatgttttcttgccaagactgtgttgatcttcagatactctctttgccagatgaagttatttgctaactccagaaattcctgcagacatcctactcggccagcggtttacctgatagattcggtaatactatcaagagaagagcctaggagcacagcgagggaatgaaccttacttgcactttatgtatacttcctgatttgaaaggaggaggtttgaaaagaaaaaaatggaggtggtagatgccacagagaggcatcacggaagccttaacagcaggaaacagagaaatttgtgtcatctgaacaatttccagatgttcttaatccagggctgttggggtttctggagaattatcacaacctaatgacattaatacctctagaaagggctgctgtcatagtgaacaatttataagtgtcccatggggcagacactccttttttcccagtcctgcaacctggattttctgcctcagctccattttgctgaaaataatgactttctgaataaagatggcaacacaattttttctccattttcagttcttacctgggaacctaattccccagaagctaaaaaactagacattagttgttttggttgctttgttggaatggaatttaaatttaaatgaaaggaaaaatatatccctggtagttttgtgttaaccactgataactgtggaaagagctaggtctactgatatacaataaacatgtgtgcatcttgaacaatttgagaggggaggtggagttggaaatgtggg

SEQ ID NO: 242 - DNA, 3230 bp, Homo sapiens
  misc_feature: Incyte ID No: 347049.9
  unsure 1354-1648: a, t, c, g, or other
ggcggctccgggtttggcaacgaggacgggggagtgcgactgcgtctcgggcagcatggccgagaagcggcacacacgggactccgaagcccagcggctccccgactccttcaaggacagccccagtaagggccttggaccttgcggatggattttggtggcgttctcattcttattcaccgttataactttcccaatctcaatatggatgtgcataaagattataaaagagtatgaaagagccatcatctttagattgggtcgcattttacaaggaggagccaaaggacctggtttgttttttattctgccatgcactgacagcttcatcaaagtggacatgagaactatttcatttgatattcctcctcaggagatcctcacaaaggattcagtgacaattagcgtggatggtgtggtctattaccgcgttcagaatgcaaccctggctgtggcaaatatcaccaacgctgactcagcaacccgtcttttggcacaaactactctgaggaatgttctgggcaccaagaatctttctcagatcctctctgacagagaagaaattgcacacaacatgcagtctactctggatgatgccactgatgcctggggaataaaggtggagcgtgtggaaattaaggatgtgaaactacctgtgcagctccagagagctatggctgcagaagcagaagcgtcccgcgaggcccgcgccaaggttattgcagccgaaggagaaatgaatgcatccagggctctgaaagaagcctccatggtcatcactgaatctcctgcagcccttcagctccgatacctgcagacactgaccaccattgctgctgagaaaaactcaacaattgtcttccctctgcccatagatatgctgcaaggaatcataggggcaaaacacagccatctaggctagtgtagagatgagcgctagccttccaagcatgaagtcggggaccaaattagcctttaactcataaagagagggtagggcttttctttttccatatgtcaattgtggtgttcccagaatgtatagcagttataaaaataggtgaaagaattgttagcttgtaaatactgagagattggtgatttatataaggtaatctgttagtcttaaaatagttaaaagtttgtatttttagattattatgtagtaggttagatccctcttgttttgacttccactgactcattctgaaccccctaagcacccaggccagaggcaagaacctgggctgtaactgccacctgacaccgctgactggctaaatgctttgcagaaagtgatgaccttacaccacaaccagcttctccaggtcatatgtgccttacctccagaagnnnnnnnnnnnnnnnnnnnnnnnnnnnnnnnnnnnnnnnnnnnnnnnnnnnnnnnnnnnnnnnnnnnnnnnnnnnnnnnnnnnnnnnnnnnnnnnnnnnnnnnnnnnnnnnnnnnnnnnnnnnnnnnnnnnnnnnnnnnnnnnnnnnnnnnnnnnnnnnnnnnnnnnnnnnnnnnnnnnnnnnnnnnnnnnnnnnnnnnnnnnnnnnnnnnnnnnnnnnnnnnnnnnnnnnnnnnnnnnnnnnnnnnnnnnnnnnnnnnnnnnnnnnnnnnnnnnnnnnnnnnnnnnnnnnnnnntgagctaccacacctggtttggagagtcttaattaaggaaatttccctaatgttcatttattttctaaatccagaccgtgtttcagaataatccttacttgagagtagccattttcttgcctgtacttgtcagaactagaggaaatagccaagactaatgaaaaagattactctaacccttaaaagacttttaaattcactactagagtggtcattttaaaaatacatccatgttttaacttatttgagccttctttatgagtaaatgattcctccttgttctgtctttcaaaccagctaaatatttgtcacaaaagtgcttttttctcactgttgcctattttcatatatcaggttttaaatagttttaattttttaataaaattttctctacgttctatatgcaattgttatatatctatttgaatagctgaaggactaaaatacttttttaagagataacttcaggaaaccattatattttactatctgcatgctgttaactgtggtacactgtgaaatatgttgattacaaacccattcattacatagtataaggaattcacagtatattgactatatagtgtctaatgatcttgggcagatactgtcaaacttacaatatctatatagatgtaggtctttttaaatttacctagtcattcttctatcatgtatattgatgctgaaagaggaactggtcagctcctctggacaacaaattcttagtctataatattaggagacatcttctgttttgcaaatgtctgtgaatctgagcaacctggcattctgcttactggccagaaagctggcgggtgacatttgtaacatttcctctttgagactctgagttcacctagagaagtctaagcataacagctttctttcccagcacgagcctttatagctctctttagctcaaccactctgtccatccagccaatggatgtcccttcccctgtaccccaatttcaagcttattttaggaagccttgaactaccatgtatcctggctcctagctgagtttattagaggtatggagcagtgcaacttaaactcaagttgcacttacattttgaattttaaaatgatggttttatctgttgtgtgaagtggttcacccttgaggaccaggagcctccatatcctgactgaaaaccttttctgagacttagagtaacagtacttttggttccttgagttctcctgtctccagataccaaatgaccttgacttttctgccttgtgaattcgtagtccaatcagctgaaattaaatcacttgggagggacgcatagaaggagctctaggaacacagtgccagtgcagaagtttctccaggtggcctccctttccaacaatgtacataataaagtgttgaatggacaatactgttttacatagagaacacagcatctggatatgctctcacaattatagtatcatggactaaactaggtcagagtgaagtatatgcaaaatgaccattttgtttttttccattttattaatagcatatggttgcagatggtgtaaatggtaaacgtgatatcatgagacattcctgatatctcacac

SEQ ID NO: 243 - DNA, 3193 bp, Homo sapiens
  misc_feature: Incyte ID No: 1097717.18
  unsure 3148, 3165: a, t, c, g, or other
accagctagttccgcttgaaaaccacttctggccccgtgggggactcaagtcgccaagcgagggttcccctgagcgccggagctcacaggtctcgccttgtcccgaaagccccgcaatcgaggcggaggcgaccgagcccccgactctcctagaacgttgccacaagaagggggaacgtcggaacagtgcatcatcgggcggcggccggggcggcggcaggagggcgggcggggggcagggctccgggggactgggcgggccatggcggaggacggcgaggaggcggagttccacttcgcggcgctctatataagtgggcagtggccgcgactgcgcgcagacactgaccttcagcgcctcgggctccagcgccatggcgccctccaggaagttcttcgttgggggaaactggaagatgaacgggcggaagcagagtctgggggagctcatcggcactctgaacgcggccaaggtgccggccgacaccgaggtggtttgtgctccccctactgcctatatcgacttcgcccggcagaagctagatcccaagattgctgtggctgcgcagaactgctacaaagtgactaatggggcttttactggggagatcagccctggcatgatcaaagactgcggagccacgtgggtggtcctggggcactcagagagaaggcatgtctttggggagtcagatgagctgattgggcagaaagtggcccatgctctggcagagggactcggagtaatcgcctgcattggggagaagctagatgaaagggaagctgggcatcactgagaaggttgttttcgagcagacaaaggtcatcgcagataacgtgaaggactggagcaaggtcgtcctgggcctatgagcctgtgtgggccattggtactggcaagactgcaacaccccaacaggcccaggaagtacacgagaagctccgaggatggctgaagtccaacgtctctgatgcggtggctcagagcacccgtatcatttatggaggctctgtgactggggcaacctgcaaggagctggccagccagcctgatgtggatggcttccttgtgggtggtgcttccctcaagcccgaattcgtggacatcatcaatgccaaacaatgagccccatccatcttccctacccttcctgccaagccagggactaagcagcccagaagcccagtaactgccctttccctgcatatgcttctgatggtgtcatctgctccttcctgtggcctcatccaaactgtatcttcctttactgtttatatcttcaccctgtaatggttgggaccaggccaatcccttctccacttactataatggttggaactaaacgtcaccaaggtggcttctccttggctgagagatggaaggcgtggtgggatttgctcctgggttccctaggccctagtgagggcagaagagaaaccatcctctcccttcttacaccgtgaggccaagatcccctcagaaggcaggagtgctgccctctcccatggtgcccgtgcctctgtgctgtgtatgtgaaccacccatgtgagggaataaacctggcactaggtcttgtggtttgtctgccttcactggacttgcccagataatcttcctttttgaggcagctatataaatgatcatttgtgcaagacaaaaaaaaaaaaccaggaccgggttctataacaacatctcttactatttttacttgaaaaaatgttttgcgtagcagactgtcatagccttgaacgccggctccctttcttcctccctccaagtggctctggggctgttgatttccgcagagcttgggttggggtaggggctcagcctcaccagctttcagcagctggtctaggccagcagtgcctccccacctccccaaggggaggggtggtggcaagacctcagcacagtctgtggtatcacagggctcactggtagagcaggtagcgcttcatggcagggggcaagggcagggcagacacctggccgagccgggtatcccccaggttgtggcgcacacacaggcggctcaggtgcagaagggagtgtggctccgctctcctttcgcccaggtagcggatgcggacctggcactggccccagacagcgcttactgccggatagagggtcctgcccttcagtccgcggaatgctggccccaggtaggtgcccccaatagcgtagcccagagttccctcctccatgtccagaaccaccagcagtctctctggcacctccagctgctcaccctgagttcccgctggatactggggggctccgggccccttgctctgatggtacagcttcccccgcccgatgtcccagccccacgactcgctgttgctgcccagcagcgccgcgtagtggtcagtctgcagcggggcgagggccgtggccacggcccaccacggcatgcgtgcccctctgctctaggggccagctgatctcccaggcgtgcaggccccttgaatagcccctcttaccccgggccccatcagtgctctgggccacgggccgccgctcaaagtacaaccctccttccttgacctcgatgttctctgaacagtctttggggttccaaccgtggcgccgctgggcccccaggtcaggagggggtgcagacagcagctcttccaagccctcgggacaggagaggtcagggtacagggcctgtggcgtgggggtgctgctgctgccccctgccagagctgtctggcccatggaggtgaggagctagaggactccccgaaagaggcttgctggggcgtctttctcttctgaaagttgagctccagtttggattgacctggaagggagctgggagaaaaggggcgtgaagagcagaatcctggcgggggctcgtcacccaggtaccccatcctttcacccaagtttgccaacgggcccgctcctccctcctcgctgccccaaagctcctgggcccttcatctgccctcgccccatctgatccaggtcgccagagactctcgcgagttcgccccatttgggcctcagcatggaccatcccccttactcgcccggagccctcgccgctgcccccgaacctcggttgacttcccagccctggaggtcgccgggcctctgaaggagccgggcggaaagaagccgaggccgcagggngcagaccgccggccgtnccgcccccagctcctccgttgggcccac

SEQ ID NO: 244 - DNA, 1304 bp, Homo sapiens
  misc_feature: Incyte ID No: 2832214CB1
cttcagcgcctcggctccagcgccatggcgccctccaggaagttcttcgttgggggaaactggaagatgaacgggcggaagcagagtctgggggagctcatcggcactctgaacgcggccaaggtgccggccgacaccgaggtggtttgtgctccccctactgcctatatcgacttcgcccggcagaagctagatcccaagattgctgtggctgcgcagaactgctacaaagtgactaatggggcttttactggggagatcagccctggcatgatcaaagactgcggagccacgtgggtggtcctggggcactcagagagaaggcatgtctttggggagtcagatgagctgattgggcagaaagtggcccatgctctggcagagggactcggagtaatcgcctgcattggggagaagctagatgaaagggaagctggcatcactgagaaggttgttttcgagcagacaaaggtcatcgcagataacgtgaaggactggagcaaggtcgtcctggcctatgagcctgtgtgggccattggtactggcaagactgcaacaccccaacaggcccaggaagtacacgagaagctccgaggatggctgaagtccaacgtctctgatgcggtggctcagagcacccgtatcatttatggaggctctgtgactggggcaacctgcaaggagctggccagccagcctgatgtggatggcttccttgtgggtggtgcttccctcaagcccgaattcgtggacatcatcaatgccaaacaatgagccccatccatcttccctacccttcctgccaagccagggactaagcagcccagaagcccagtaactgccctttccctgcatatgcttctgatggtgtcatctgctccttcctgtggcctcatccaaactgtatcttcctttactgtttatatcttcaccctgtaatggttgggaccaggccaatcccttctccacttactataatggttggaactaaacgtcaccaaggtggcttctccttggctgagagatggaaggcgtggtgggatttgctcctgggttccctaggccctagtgagggcagaagagaaaccatcctctcccttcttacaccgtgaggtcaagatcccctcagaaggcaggagtgctgccctctcccatggtgcccgtgcctctgtgctgtgtatgtgaaccacccacgtgagggaataaacctggcactaggtcttgtggtttgtctgccttcactggacttgcccagataatcttcctttttgaggcagctatataaatgatcatttgtgcaagaa

SEQ ID NO: 245 - DNA, 1090 bp, Homo sapiens
  misc_feature: Incyte ID No: 2947513CB1
gaggcaagaaattcggcacgagggaccttcagcgcctcggctccagcgccatggcgccctccaggaagttcttcgttgggggaaactggaagatgaacgggcggaagcagagtctgggggagctcatcggcactctgaacgcggccaaggtgccggccgacaccgaggtggtttgtgctccccctactgcctatatcgacttcgcccggcagaagctagatcccaagattgctgtggctgcgcagaactgctacaaagtgactaatggggcttttactggggagatcagccctggcatgatcaaagactgcggagccacgtgggtggtcctggggcactcagagagaaggcatgtctttggggagtcagatgagctgattgggcagaaagtggcccatgctctggcagagggactcggagtaatcgcctgcattggggagaagctagatgaaagggaagctggcatcactgagaaggttgttttcgagcagacaaaggtcatcgcagataacgtgaaggactggagcaaggtcgtcctggcctatgagcctgtgtgggccattggtactggcaagactgcaacaccccaacaggcccaggaagtacacgagaagctccgaggatggctgaagtccaacgtctctgatgcggtggctcagagcacccgtatcatttatggaggctctgtgactggggcaacctgcaaggagctggccagccagcctgatgtggatggcttccttgtgggtggtgcttccctcaagcccgaattcgtggacatcatcaatgccaaacaatgagccccatccatcttccctacccttcctgccaagccagggactaagcagcccagaagcccagtaactgccctttccctgcatatgcttctgatggtgtcatctgctccttcctgtggcctcatccaaactgtatcttcctttactgtttatatcttcaccctgtaatggttgggaccaggccaatcccttctccacttactataatggttggaactaaacgtcaccaaggtggcttctccttggctgagagatggaagcgtggtgggattgctctgggtcccctagcctat

SEQ ID NO: 246 - DNA, 2560 bp, Homo sapiens
  misc_feature: Incyte ID No: 1655369CB1
ttccagtgaagagcaagtgctgcccgacccaggaccctgtgccaggctagcagccctccagctccctccagagaggaaacctctgtctggctgagggtgggactagctgggatgtctcactccagttgctcaggttcacccaggaagctcctccgtggagtggccagcctgattctagccctgtcctctctggcagcacatgccacacctgcctgggccttctgctccctgatgcttgatgagcccctgcctcctcaatgtttctcaaagacagacccccctgaggccagcttgaatgtgaagactgctgaagtcagctggcttcacttgagctgcagaaaaggtggctgggatggcccaggtgcacccagaggccccagccctttggctgcctttgggttgtgacttgggttgtctctgaggccctgccagagctgggcctgcgggtggtgggcggtccgacctcgggcagtcagtgctccgcagcctcagcactgcatcccagacccagtgtcctcagagggaagagccagcctccctgcctcatggaaccaggagtcccaaaaagtcaggagcctggaggctctgaaaggagcagggattccatagtgcgtgaagctgaaataggcgccctcctggggagcccccagcaaaactgtttttcatacccactcccagaactgccccgctccagctccagcgccagcgccagctggttgccaggcgtcattggagaggcctggctgccccaggggcagcagggagtggtggacctgtatgggctggcaggaggccattggccatgctgacaagtgtcacctgccttcctagcctggagccacccctcaggtggcctgcttgcacctcctatccggaggtagcctgccccacctgtaggcagagggggctcttgcttgaggcctgcacaggaagcaagtatagccccggtgccccagagtgggttccacttagccctggcgagatggcctgtcctgagatctctgctcccagaccccaccatctggggagcacagtccttaggctgcctggtccaggaagggggtgcggctctgtcaggaaacctggactctcaaggcccaccagcctctccgtgagtgttagaaatcacagatacagtatatacttaattacactaaattattgctgggattccttataagcactaattatacctgattataggttaaaatatttattttgtcaaaatattttcttgggaatgtgtttaaccctttctgcgttcattgttgctgagatgtgaaaactaaccattccctcctgcctacctttttggccactgggcggcagagaatggcgctatgtgcagttgggcccctggcaccatgggcctttggcctgcctgctgcagagtagccctgcctgggcagtctccaggcactgagcaggccatctgtggccaggctgagagaatgactggctcgcttaccagcgtgcatgggacaaggagctttggagcctcaaggggttgttgctggcctgggctagagggaaaggtgaccatccgtctgtcctcctgtctttctattagcgcctccatgtgagtgatggtgccttggttcactagccttcccccaccaccccaccatgccacctggtggtcttggggcctgtgctgtcactccagcccctggggaggagaggacccagcccggagagttggggcaagggctccacatggcccaagggcaacagatgctcgcagggcagctgctgccgatgctcacgctcctgcccccctccttcccgctgccacaccccaccctgggcccccgcagacacgcatctctaactcagttgggcccagccttctggatggcttggggtaggccatgggcccacctggggccaggccagcccctggggcagctctggaagagcagtgtggaggagcacttgcttgcagcctggcttcagcctctggcactgctggagtggtccctgggagcttctgcactgtcggctttggggacgtctcacccacttgggttacagtaggccttccccacccagagagaagtgtttccaccccagagacattgtctgtcagcccctgaagtgctcgcctcccccagtgcccgtcaccagcccttcctatctgtggggtccaagtcaggcttcccctgcggccaccagccatagggagcagccatcagcccccgagtcagaactgcttctgtctgtccatacctccaggctctcccggagagggggacggatatttatttcctaaagtttgcacttaattgtgaggattctcaggattgttgggggctactgaaaagaggaatgtgttgaatgtcgcgtttgctgtccactcgtcctagaagtttagtgtttttgtcactgtcatgtgtttctgtgggcagagctggttctggagggtgggtcagtgcacccgaggctcagagcatccatccaccccactggccctccttccagataccctctctctaattgggttcttgcatgtaaaatactccacaataaataaataattgaacaaattaaaaaaaaaaaa

SEQ ID NO: 247 - DNA, 557 bp, Homo sapiens
  misc_feature: Incyte ID No: 039170.3
gctgagcgccgggcgcgttccgttggcggcggattcgaacgttcggactgaggtttttctgcctgaagaagcgtcatacggaccggattgttttcgctggcccagtgtccccggagcttgtgtgcgatacagagagcacctcggaagctgaggcagctggtacttgacagagaggatggcgctgtcgaccatagtctcccagaggaagcagataaagcggaaggctccccgtggctttctaaagcgagtcttcaagcgaaagaagcctcaacttcgtctggagaaaagtggtgacttattggtccatctgaactgtttactgtttgttcatcgattagcagaagagtccaggacaaacgcttgtgcgagtaaatgtagagtcattaacaaggagcatgtactggccgcagcaaaggtaattctaaagaagagcagaggttagaagtcaaagaacatattcttgaaagttatgatgcattcttttgggtggtaacagatcataaagacattttttacacatcagttaatatgggattattaaatattggctataagtg

SEQ ID NO: 248 - DNA, 292 bp, Homo sapiens
  misc_feature: Incyte ID No: 1074926.1
  unsure 199, 227: a, t, c, g, or other
gcctatgccgagaatagctcgaggaaattggagccccagctgttaaaagagcagagggcagggtgagggccgtggcctctcaggggtatctggaaggctcttcgagttgagtgcagacccagcctgggctggaaaatggacaaaggtcatcttgctggggtgaaaagggggagagcagaaccaagaagaagaaggtganggctggggggctccagggcactggttangaattgtggggaatgaaggcttctttagtctcatccccctgtggtaccatcttgtcctcagagtg

SEQ ID NO: 249 - DNA, 1196 bp, Homo sapiens
  misc_feature: Incyte ID No: 344297.5
gccgagggcgcgcagggagcgggatgcgaaggagcgggacaccatgaaggaggacggcggcgcggagttctcggctcgctccaggaagaggaaggcaaacgtgaccgtttttttgcaggatccagatgaagaaatggccaaaatcgacaggacggcgagggaccagtgtgggagccagccttgggacaataatgcagtctgtgcagacccctgctccctgatccccacacctgacaaagaagatgatgaccgggtttacccaaactcaacgtgcgagcctcggattattgcaccatccagaggctccccgctgcctgtactgagctgggcaaatagagaggaagtctggaaaatcatgttaaacaaggaaaagacatacttaagggatcagcactttcttgagcaacaccctcttctgcagccaaaaatgcgagcaattcttctggattggttaatggaggtgtgtgaagtctataaacttcacagggagaccttttacttggcacaagatttctttgaccggtatatggcgacacaagaaaatgttgtaaaaactcttttacagcttattgggatttcatctttatttattgcagccaaacttgaggaaatctatcctccaaagttgcaccagtttgcgtatgtgacagatggagcttgttcaggagatgaaattctcaccatggaattaatgattatgaagctgttggatctctgtgtcctggatgttgactgccttgaatttccttatggtatacttgctgcttcggccttgtatcatttctcgtcatctgaattgatgcaaaaggtttcagggtatcagtggtgcgacatagagaactgtgtcaagtggatggttccatttgccatggttataagggagacggggagctcaaaactgaagcacttcaggggcgtcgctgatgaagatgcacacaacatacagacccacagagacagcttggatttgctggacaaagcccgagcaaagaaagccatgttgtctgaacaaaatagggcttctcctctccccagtgggctcctcaccccgccacagagcggtaagaagcagagcagtgggccggaaatggcgtgaccaccccatccttctccaccaaagacagttgcgcgcctgctccacgttctcttctgtctgttgcagcggaggcgtgcgtttgcttttacagatatctgaa

SEQ ID NO: 250 - DNA, 2420 bp, Homo sapiens
  misc_feature: Incyte ID No: 410721.1
ggatccaggccctgccaggaaaaatataagggccctgcgtgagaacagagggggtcatccactgcatgagagtggggatgtcacagagtccagcccaccctcctggtagcactgagaagccagggctgtgcttgcggtctgcaccctgagggcccgtggattcctcttcctggagctccaggaaccaggcagtgaggccttggtctgagacagtatcctcaggtcacagagcagaggatgcacagggtgtgccagcagtgaatgtttgccctgaatgcacaccaagggccccacctgccacaggacacataggactccacagagtctggcctcacctccctactgtcagtcctgtagaatcgacctctgctggccggctgtaccctgagtaccctctcacttcctccttcaggttttcaggggacaggccaacccagaggacaggattccctggaggccacagaggagcaccaaggagaagatctgtaagtaggcctttgttagagtctccaaggttcagttctcagctgaggcctctcacacactccctctctccccaggcctgtgggtcttcattgcccagctcctgcccacactcctgcctgctgccctgacgagagtcatcatgtctcttgagcagaggagtctgcactgcaagcctgaggaagcccttgaggcccaacaagaggccctgggcctggtgtgtgtgcaggctgccacctcctcctcctctcctctggtcctgggcaccctggaggaggtgcccactgctgggtcaacagatcctccccagagtcctcagggagcctccgcctttcccactaccatcaacttcactcgacagaggcaacccagtgagggttccagcagccgtgaagaggaggggccaagcacctcttgtatcctggagtccttgttccgagcagtaatcactaagaaggtggctgatttggttggttttctgctcctcaaatatcgagccagggagccagtcacaaaggcagaaatgctggagagtgtcatcaaaaattacaagcactgttttcctgagatcttcggcaaagcctctgagtccttgcagctggtctttggcattgacgtgaaggaagcagaccccaccggccactcctatgtccttgtcacctgcctaggtctctcctatgatggcctgctgggtgataatcagatcatgcccaagacaggcttcctgataattgtcctggtcatgattgcaatggagggcggccatgctcctgaggaggaaatctgggaggagctgagtgtgatggaggtgtatgatgggagggagcacagtgcctatggggagcccaggaagctgctcacccaagatttggtgcaggaaaagtacctggagtaccggcaggtgccggacagtgatcccgcacgctatgagttcctgtggggtccaagggccctcgctgaaaccagctatgtgaaagtccttgagtatgtgatcaaggtcagtgcaagagttcgctttttcttcccatccctgcgtgaagcagctttgagagaggaggaagagggagtctgagcatgagttgcagccagggccagtgggagggggactgggccagtgcaccttccagggccgcgtccagcagcttcccctgcctcgtgtgacatgaggcccattcttcactctgaagagagcggtcagtgttctcagtagtaggtttctgttctattgggtgacttggagatttatctttgttctcttttggaattgttcaaatgtttttttttaagggatggttgaatgaacttcagcatccaagtttatgaatgacagcagtcacacagttctgtgtatatagtttaagggtaagagtcttgtgttttattcagattgggaaatccattctattttgtgaattgggataataacagcagtggaataagtacttagaaatgtgaaaaatgagcagtaaaatagatgagataaagaactaaagaaattaagagatagtcaattcttgctttatacctcagtctattctgtaaaatttttaaagatatatgcatacctggatttccttggcttctttgagaatgtaagagaaattaaatctgaataaagaattcttcctgttcactggctcttttcttctccatgcactgagcatctgctttttggaaggccctgggttagtagtggagatgctaaggtaagccagactcatacccacccatagggtcgtagagtctaggagctgcagtcacgtaatcgaggtggcaagatgtcctctaaagatgtagggaaaagtgagagaggggtgagggtgtggggctccgggtgagagtggtggagtgtcaatgccctgagctggggcattttgggctttgggaaactgcagttccttctgggggagctgattgtaatgatcttgggtggatcc

SEQ ID NO: 251 - DNA, 4125 bp, Homo sapiens
  misc_feature: Incyte ID No: 1121097.1
gacgagacgagcccactagtgtccccgagcgggcccaacccccggactacaccttcccgtcgggctcgggcgctcactttccgcaggtgcccgggggcgcggtccgagtggcggcggcggccggctcgggcccctctccgccgggctcgccgggccacgaccgcgagcggcagccactgttggatcgggcccggggcgcggcggcccagggccagacccaaaccgtggcggcgcaggcccaggctctggccgctcaggccgcggcggcagcccacgccgctcaggcccaccgcgagcggaacgagttcccggaggatcctgagttcgaggcggtggtgcggcaggccgagctggccatcgagcgctgcatctttcccgagcgcatctaccagggctccagcggaagctacttcgtcaaggaccctcaggggaggatcattgctgtcttcaaacccaagaatgaagagccctatgggcatcttaatcctaagtggaccaagtggctgcagaagctgtgctgtccttgctgctttggccgtgactgccttgtccttaaccagggctatctctcagaagcaggggccagcctggtggaccaaaaactggaactcaacattgttccccgtacaaaggtagtatacctggccagtgagaccttcaactatagtgccattgaccgagtgaagtccaggggcaagcggcttgcactagagaaagtgccaaaagttggacagcggtttaaccgcatcgggctaccaccaaaggttggttcattccagctctttgttgaaggctacaaagatgcagactattggctgcggcgttttgaagcagaacctcttcctgagaacactaaccggcaactactgctccagtttgagcggttggtggtgctggattacatcatccgcaacactgatcgaggcaatgacaactggctgattaaatatgactgtccaatggatagttctagctctcgggacacagactggggtggtggtgaaggagcctgttatcaaggtggctgccatagacaatgggctggccttcccactgaagcatcctgactcctggagggcatatcctttttactgggcctggttgccccaggcgaaagtcccattttctcaggagatcaaagatctgatccttccaaagatatcggaccctaacttcgtcaaggacttggaagaggacctatatgaactcttcaagaaagatcctggtttcgacaggggccagttccataagcagattgctgtcatgcggggccagatcttaaatctgacccaggccttgaaagacaacaagagtcccctgcacctcgtccagatgccacctgtgattgtcgagacggcccgttcccaccagcggtcttctagcgagtcctacacacagagctttcagagccggaagcccttcttttcatggtggtagctccagaggcaggcagaggaaatattgtcagagactggtgggaggaagcctggggagtggggtgcaggaaaagccagagaagccggtggagagcagcacctttaagagccctctctctctgcttgccaccctgctcagagctttccacccacagggagaagcacaatcaggaacagtgagtgctcctcgcccttctgatgtgggggaggctggagctccatgcacgtagtccagatgcctgggaaggaacatctcccttccagcatctgctggtagcaggctgggacagtcccttccttccctgaaaccctgctctattgcaattccctattatattctgcatcagaaaaacaaacaaaacaaaaacaactttaaatgcttgtagcagaaccccgggtcatctcatgtcagaaacctttaatccaggcctaaatttgcatagacctgacattcagctgccttgcagttgcttcctcccatgagccaaggtggtgtcagagggcaactggatgactcgcagtaccacagcactgggacagacagaagccacacctttcttttgggtttttgccaagcctcctccatctcccatcagtgctgtgggctggctgcaagcctcgaaacagttctcctggaagggaggtttttgctttacccccgccagcacttccgcacacaatcatagagaacctctctgctctctgctggcctacagcttgtctgtttctcaagcagaggcaggaagagctagtcttagcatttatattttaatagaaagttgactcccagcatgtaaaagtgatccacgcagccggagtgtatgccgggagctaagtggtctatgggtgaacatatcccaccttgcttcctgagtccttggtcccaatcttctcatttgttcctctcgttttaaattttttccccccaactcttttgatgtaagagttcagtttgtcttcgggagtgggtctctgcaagggctctgggatgagtcttggcttccaagaggacaggctattaggttcttggacttttttctgtgctaccgctgctgcttggtggaagtaacaggacgtggattctgcctcataagtggcagtttcccttttctctctgacttgtcctaggccgatttctctatggcttccctgagaaaggtgaggcccaaaggagagaggccttcaaactgtcccaggtcctgcgcagctcagtgcgtatcttcttgcttccatgtgtcttttcccctgctgcctcactccccacccccacttgccaggtgtttgagccatttctacaccaaagcaaagtacggcctcaggagggagtaaaaagggtgccatctgtgtctggaggggcagctgtgttcatgccctgtgctactggacatttcacaattctggcaccttgcgattggtcagtcaacctcagaaagtaactatcttgaaggtttgaaaaacaaccaaagaaagggagtgaggactatggctgcatgtcctctgcttgcccggctgcagagcagagatgtgcagccctctggtcagctggtccaggctggtccccgccggtccccttccagtccagccaccaagagtccacttgtcccgggcttccacctggctgacaggaagaatttctgagagctggatgtgcatgccctgtggacgaaggtacagctcgcctgcctgccccaatcccagccccgacaatcacatgcagctgactcggacactggccttgggaacaatgttcgagagaacacttgccccttgactgtaggagccagaaggggacccaggtgtgcatagctctctgtagacatttttacccaaacctgttggtaaagtgcccatctggtgctcaagagagcctgggggtctaacagggagcccggctgcctcacctggccacagcctccacaccagatctccacattgtcttgatccagaccagctctgtgatcagaaggaaattgggtccagtgtaggagagagctggtcctgggcctggcaggcaagagtgtgggcatcctttcctggcctttctccactctccctcaagcctgtgctcaggttgccttgaatgtggactctggaagagccaggggcccagaatgccgggggaggcttctgagtggcactcatggaacaccgtccctctgccagccataggccctgcctccagtgtcagggaatggaggctgggctgcgagagtgttgctgccccctgtgtcattcttctaatccaatgtagaaattgtacgtaatgtatttaaatcaacgcaaatgtatgaataacaaatacagttctgaccttttttgtccagtttctttgggggaaggaagacaaagaaggtaggaacggaattttgagggcaaagaaacctgtgtttccatggaattgctgagacgtggctcctggggctatttctccctaataaaggatgatccaggtcctcatttccaaagtcccaatgctctgaaaaccaaaagtattttcataacccatttgaaaccaaacctgacctgaacttacactgataggaagctatgggtaattatgatgtgttccttttagtgtgattctttgttgcagaaatgtcaatatattttatgacatggttccctactagggattatacagtatttgctgactacttcctaagagccaaaaataaaaaatctgaattcc

SEQ ID NO: 252 - DNA, 1114 bp, Homo sapiens
  misc_feature: Incyte ID No: 1097450.22
agtggaggagggagagacgctggcccgggacccgaggggcgtgggcatcgggaggcgggcccgggttaggggcgggaccgccgcctggttaaaggcgcttatttcccaggcagccgctgcagtcgccacacctttgcccctgctgcgatgaccctgtcgccacttctgctgttcctgccaccgctggctggctggctgctggacgtccccacggcggcggtgcaggcgtcccctctgcaagcgttagacttctttgggaatgggccaccagttaactacaagacaggcaatctatacctgcgggggcccctgaagaagtccaatgcaccgcttgtcaatgtgaccctctactatgaagcactgtgcggtggctgccgagccttcctgatccgggagctcttcccaacatggctgttggtcatggagatcctcaatgtcacgctggtgccctacggaaacgcacaggaacaaaatgtcagtggcaggtgggagttcaagtgccagcatggagaagaggagtgcaaattcaacaaggtggaggcctgcgtgttggatgaacttgacatggagctagccttcctgaccattgtctgcatggaagagtttgaggacatggagagaagtctgccactatgcctgcagctctacgccccagggctgtcgccagacactatcatggagtgtgcaatgggggaccgcggcatgcagctcatgcacgccaacgcccagcggacagatgctctccagccaccgcacgagtatgtgccctgggtcaccgtcaatgggaaacccttggaagatcagacccagctccttacccttgtctgccagttgtaccagggcaagaagccggatgtctgcccttcctcaaccagctccctcaggagtgtttgcttcaagtgatggccggtgagctgcggagagctcatggaaggcgagtgggaacccggctgcctgcctttttttctgatccagaccctcggcacctgctacttaccaactggaaaattttatgcatcccatgaagcccagatacacaaaattccaccccatgatcaagaatcctgctccactaagaatggtgctaaagtaaaactagtttaataagcccttc

SEQ ID NO: 253 - DNA, 5697 bp, Homo sapiens
  misc_feature: Incyte ID No: 238533.1
cgcggatcctgtgacacctccgggcagcccggcacttgttgctcccacgacctgttgtcattcccttaacccggctttccccgtggccccccgcctcctcccggcttcgctccttttcatgtgagcatctgggacactgatctctcagaccccgctgctcgggctggagaatagatggttttgtgaaaaattaaacaccgccctgaagaggagccccgctgggcagcggcaggagcgcagagtgctggcccaggtgctgcagaggtggcgcctccccggcccgggacggtagccccgggcgccaacggcatgacagactcggcgacagctaacggggacgacagggaccccgagatcgagctctttgtgaaggctggaatcgatggagaaagcatcggcaactgtcctttctctcagcgcctcttcatgatcctctggctgaaaggagtcgtgttcaatgtcaccactgtggatctgaaaagaaagccagctgacctgcacaacctagcccccggcacgcacccgcccttcctgaccttcaacggggacgtgaagacagacgtcaataagatcgaggagttcctggaggagaccttgacccctgaaaagtaccccaaactggctgcaaaacaccgggaatccaacacagcgggcatcgacatcttttccaagttttctgcctacatcaaaaataccaagcagcagaacaatgctgctcttgaaagaggcctaaccaaggctctaaagaaattggatgactacctgaacacccctctaccagaggagattgacgccaacacttgtggggaagacaaggggtcccggcgcaagttcctggatggggatgagctgaccctggctgactgcaatctgttgcccaagctccatgtggtcaagattgtggccaagaaataccgcaactatgatatcccggctgagatgacaggcctgtggcggtacctcaagaacgcctatgcccgtgatgagttcaccaacacctgtgcagctgacagtgagatcgagttggcctacgctgatgtcgccaaacgcctcagccgatcctgagcacagccattttgccccatccccgctgcagaaggactcaaccactcccctaagactccagcttcatagactcctctgtatcactgccttgaggcgcactttttataatcaagcctcatcttgctggtatcatgggaactccagcctgctatctttcatgaaggtcagcaccatccctggcctcctcacataggaatctagcagaaatgatagacacagtccacctttcggccggccagcctgatctgggctcagcatgtttggggtcagtcagtgttggagagcccacatatgggattgccactagcttcttctgccaatatcaaaataccttctcagatgctttagaaacatgcaacaccaactccttttctaccctcctctccgtccatacctacaaggccaaggacaaacgccatcttcatccttcttagaaagagatctattaccccattaggggagacagagagagtgaatggaggagtaccgagctggctatggacttgggtgtctggcaaacacagcttcagtctcactacttctgacactctggttattgggcactaagggccagactggaaagtcacttgagacacattctcagtttgttgcagtgccaggaatgctgcgctgctgctgctgcgcacctggcccatgctgtccctggcttccatgctgtccaggccctgccagaaaaggaaattggcatgcaattctaaactgcagtgactgggatgggaggggaggggagcagtgttgatgccaaaatacccacggggtctaccagccatggggtttgcttgcttaggagtagttgtttcagaggtgattacaggcctgggtttgactgtgcttaccaatgagtggtttttgagctatgagaaagtggatgggagtgggaggaggagagatgggtgaagacaaaagagttctttatgagcctcgatgttccctggtaaacttttaaaaaggccttctctcatgatctaagtcttggactggtggcatcatgtaactgctaaccttacagtaaaaacccaagaatgggtcaaaaatgtcttcccagtttctccaagctgcttctggaatgcaggtctgtcggctgggtgctctccagcagctgctcctgcctgattcaactgtagcctgtaatgggtaaaagccacatttaggaggtggtctgatcatagaacaccttaggaagaaagtccatgagactttctgactaggaaaccatgtggtttgaacttgaagaaaaatgtagacccatctgggttaattttcctacaatctgactcaactgccaggtgaaaaaaaaaaggaaaaatttttaagctaatatttcactcttttgtcattctccttaagtttcatctcctaaaaagcttacccagcctgagcttggggacctgtgcagaggaaactaagaaaaatgcactcatcaactccttctcccagtgaacgcccggtgagaaaatccatttgccacaggcccttaccttcaacaatcccccttctatagtgttcgctggtaaagggtgaggctcccaagtgctggaaagcccctggacttggctcatttctcagcaagggcaggatagcacgggtcctttccatagaaatatcaacaaattctaacccaagcaatccctggacctacctgcctccagggatctctgaagaaaaaaagtaacccattgatcaaatcagaggagaggaagcaggaggtctcctagagcccattgaggaagaggaactttctcagtaggacactttataagcctgagaaagctttgaaaaggcggaatgagttgattcatttccacctcaaaaggaacctttccaggtccccctggaaattgtgccctggagatgtttaacaaggagaactggtgaggaaagagtccttttttactgtagggaaaagccccaaactggcctcctgggggatgagggctgaaatgatcccgaaggccttttaattagtgtgaaatcctgctgtactcagaaatccttccccgaatttacagcacaggcaggatgacctaagaggcagtttacttccctgagacccacagttgggctgttctggaaacacatctgtgaatcatagccaattgccacagagaaaacagaaccaagcctccggtgaggccactccaccccagagaagtctgcagaattccaaggactcggattggatgttcagaattcagcaactggaaagtccttaaaaacaaacaggccaaaccaaatcaatattgctgtttctagatgtcccttctgtggttgagctagttttacagagataaatatattaagacaaggaggtgggggtgttatatgatcaatgatagccatttgaaagagagggaggagtacagaaggaaggcacttctgggtacttaattcagaaatttctttatatttcagcactggattatcatataatgcaagtgactatggactaagagttagttatggtgtcttatgactagatttattatggtatattaaagtaacaataatattaatattaccttcctttttttttttgtttcaaaagagatctttctccagatgcttcagcctgtctggccttcttatcatatgtgcagcacatcatgtctcagcaacagtgtggtgaggtcccttaggtgtcccaagaacaactcagggagcacgggagggtctgcagttgggaccccacaactatacagctatagggtaggaggcttccttttcattggtcctgaatgaatacaaatcgctcagaaagcattttggtggcacagaaaggggatgtatttgtgttgagatcttattttattttgtatttatttatcttctttgacttgcacagcactattgggggtgggggaagcagggtagtgggagacgaaggcagaagcaagagtcaaactcagaatgactgagttgaattcactgtctagtcagcaatgcctgcttctgagtttggcccagagagaaggtattgagtaagattttaataactgtaaaaagtaagctggataagtaaaatcatgatggatccaaagcacagtttcttcatctcctgataaagaaagtcaaatgcttgataaattcagagtcacagatgtgagcatagctatattcttttaaacgagaggtagagtgacctagcactaagcaaatgagctgaaatgtcggaaacagagtccatcagcttatttggccacacgatcccaaactagttttatcttgggaaatggccctgtcctcagcattcccttcttgtgctggtggggccagtgaagtcttgatcttatcagaaaaaggccacaccaagtgcgagttttcccaggctgactttccaggcccttatcaaatgaaacaacagaagctcttcacagttctgtgccccatggccactccacagacagacaataccaagcatcttagaactgtcataagataggtcatgcctgaaatagatcttgaccatatgagagtcccagaaatcagcaaggcctggacaaatagaactaagagagaggcagaggcaggaagctgcgggtctatcttgtaaagagtttagcatcactgtgagagtgtgtgtctaaaattaaattaaactagaagcagcaggtgagtatttggtaagtacttctgtgactcgcctcaattcccactggccaggggccatctcaactgcacggtgaatcaagatgctggtgtcatcctccttggaaaaaggaaatgttaactcatggttaaaactaagtacaatgattcccaagggatcactttcttatttttttaaatgacattaaggagaatcttaagaaagcatcagagaaagacatgtgcatgtgaagcaccctgattctgatgttaggaaaacttaagcgaacaggacctgctgcacacagccccattgtcttctatccatttctctttatcattcaaatcaagcaacatgtgccctcctcatcaacacacattcttcccctttgtcagtatgcatctcccagcttagtgtcaggatactttcgattcataattatgtatgatccaaagtgtgcataatttcatttaacgttaaagaaatagatccaattcctttcttgcaaccaaaaataaataaaatacgttgcctcaatataaggtttgggctattctgtgtttctatagaagcaatctgtttttggtaaaatgtacttttaaggatccagtcatctgaagtattttatgtagagttagagatttcacaatattgactatacatatatttaaaatataaattatccagctgatgtttgaatttgtcttactttcctggccacctcgttgtcctattttataagctggggagttaactagcttaacaaaagatgcttagcttttgtaaaagaacaagtgtttcattttacaaagacactccaaatgatagttacttgattttctcgagacctttaactatggtgatgaataacaggacttgctttcaagccttaataaatgtaaaatgccttttaatgaagatacagctgagtgttttcctcatgaatctgaaccaattaccaatttgtgttccagtcttgattggtattgactgattcaaataaagttggtttattttcaaatatt

SEQ ID NO: 254 - DNA, 2272 bp, Homo sapiens
  misc_feature: Incyte ID No: 1097080.8
tcgtctgatcatctcactgttcagaaggagaaactgacacccagaaagaaaaatgagacctgcccatgtcacaagaagagtctgtggcagacctgggtcttggcccatccccccattgatactgagcccccgagcctcctgcctgtctatcttctccaggacaggagctcccagtgcctcagactgcagagtctaccccacgtggatggaagacagtgaggctggccagctgcacgtggaagatgtgacgtctcttctcagtctttgaccacaaacatcccagaggcacccccagcccggccggtcccgcacggctccgggtagccatggaggaccccacgctctatattgtcgagcggccgcttcccgggtaccccgacgccgaggccccggagccttcctccgctggggctcaggcagcggaggagccgtcgggggccggctcagaagagctgatcaagtcggaccaggtgaacggcgtgctggtgctgagcctcctggacaaaatcatcggggccgtagaccagatccagctgactcaagcacagctggaggagcggcaggcggagatggagggcgcagtgcagagcatccagggcgagctgagcaagctgggcaaggcgcacgccaccacgagcaatacggtgagcaagctgctggagaaggtgcgcaaggtcagcgtcaacgtgaagaccgtgcgcggcagcctggagcgccaggcggggcagatcaagaagctggaggtcaacgaggccgagctgctgcggcgccgcaactttaaagtcatgatctaccaggatgaagtgaagctgccggccaaactgagcatcagcaaatcgctgaaagagtcggaggcgctgccagagaaggagggcgaggagctgggcgagggcgagcggcccgaggaggacgcagcggcgctggagctttcgtcggacgaggcggtggaggttgaggaggttattgaggagtcccgcgcagagcgtatcaagcgcagcggcctgcggcgcgtggacgacttcaagaaggccttctccaaggagaagatggagaagaccaaggtgcgtacccgcgagaacctggagaagacgcgcctcaagaccaaggaaaacctggagaagacgcggcacaccctggagaagcgcatgaacaagctgggcacgcgcctggtgcccgccgagcggcgcgagaaactgaagacgtcgcgggacaagttgcgcaaatccttcacgcccgaccacgtggtgtacgcgcgctccaagaccgcggtctacaaggtgccacccttcaccttccacgtcaagaagatccgcgagggccaggtggaagtgctcaaggccaccgagatggtggaggtgggcgccgacgacgacgagggcggcgcggagcgcggggaggccggcgacctgcggcgcgggagcagccccgacgtgcacgcgctgctggagatcaccgaggagtcggacgccgtgctggtggacaagagcgacagcgactgagccgcccccgctgccacccaccccattcctcgctccttccgaacttcctctttcgcattctctctcggctcgagctggctgagatttttctaaattgaaaacacgcccccctccccacacctccaggaactccactcccagtcttagagctgttaggacccgatggggaggcagcccccgcagtggacagcccccgcttggacacagtccgagtggaatgggaagggaatggtcaatccctgtcctggttgtccaagtcgggatctcagaggaaattgcagtgattccacggttaggcccccctgggggggctgccttcccctcagcctctccccacaccacccacccagctgctgtcattccgctcactgagctcttcttcattctcaccctgatccctgggggactcaaagccaaaactgcccaaagaggaaagattgaatcctaaaggggatccttgcccccatgggaggccccctactagaaggacgtgaaagcagcttttgggggaaactgaggcagtggggaagacagagcagaatgagccctcaccctggctgggggtccagcacaggctgtatctgcagagggtcccagaggaacgctggagccaagagaagccctgggaaggaggggtggggaacgacatgcatgtgagggatggcacactgatgtgtttatgcacctgtacacaggagcgcatggccatggctttggaaaggagaatggaaaaatagaagaaggtcggccgggcttggtggcttaagcctgta

SEQ ID NO: 255 - DNA, 986 bp, Homo sapiens
  misc_feature: Incyte ID No: 1097450.20
ggaccgccgcctggttaaaggcgcttatttcccaggcagccgctgcagtcgccacacctttgcccctgctgcgatgaccctgtcgccacttctgctggacgtcccctctgcaagcgttagacttctttgggaatgggccaccagttaactacaagacaggcaatctatacctgcgggggcccctgaagaagtccaatgcaccgcttgtcaatgtgaccctctactatgaagcactgtgcggtggctgccgagccttcctgatccgggagctcttcccaacatggctgttggtcatggagatcctcaatgtcacgctggtgccctacggaaacgcacaggaacaaaatgtcagtggcaggtgggagttcaagtgccagcatggagaagaggagtgcaaattcaacaaggtggaggcctgcgtgttggatgaacttgacatggagctagccttcctgaccattgtctgcatggaagagtttgaggacatggagagaagtctgccactatgcctgcagctctacgccccagggctgtcgccagacactatcatggagtgtgcaatgggggaccgcggcatgcagctcatgcacgccaacgcccagcggacagatgctctccagccaccgcacgagtatgtgccctgggtcaccgtcaatgggaaacccttggaagatcagacccagctccttacccttgtctgccagttgtaccagggcaagaagccggatgtctgcccttcctcaaccagctccctcaggagtgtttgcttcaagtgatggccggtgagctgcggagagctcatggaaggcgagtgggaacccggctgcctgcctttttttctgatccagaccctcggcacctgctgcttaccaactggaaaattttatgcatcccatgaagcccagatacacaaaattccaccccatgatcaagaatcctgctccactaagaacggtgctaaagtaaaactagtttaataagccctt

SEQ ID NO: 256 - DNA, 1291 bp, Homo sapiens
  misc_feature: Incyte ID No: 2514988CB1
  unsure 46: a, t, c, g, or other
gcagggggagaacagcccacctcgtgactgggggctgccccagccnaccctatccctgggggagggggcgggacagggggagccgtataattggacaagtctgggatccttgagtcctactcagccccagcggaggtgaaggacgtccttccccaggagccgactggccaatcacaggcaggaagatgaaggttctgtgggctgcgttgctggtcacattcctggcaggatgccaggccaaggtggagcaagcggtggagacagagccggagcccgagctgcgccagcagaccgagtggcagagcggccagcgctgggaactggcactgggtcgcttttgggattacctgcgctgggtgcagacactgtctgagcaggtgcaggaggagctgctcagctcccaggtcacccaggaactgagggcgctgatggacgagaccatgaaggagttgaaggcctacaaatcggaactggaggaacaactgaccccggtggcggaggagacgcgggcacggctgtccaaggagctgcaggcggcgcaggcccggctgggcgcggacatggaggacgtgtgcggccgcctggtgcagtaccgcggcgaggtgcaggccatgctcggccagagcaccgaggagctgcgggtgcgcctcgcctcccacctgcgcaagctgcgtaagcggctcctccgcgatgccgatgacctgcagaagcgcctggcagtgtaccaggccggggcccgcgagggcgccgagcgcggcctcagcgccatccgcgagcgcctggggcccctggtggaacagggccgcgtgcgggccgccactgtgggctccctggccggccagccgctacaggagcgggcccaggcctggggcgagcggctgcgcgcgcggatggaggagatgggcagccggacccgcgaccgcctggacgaggtgaaggagcaggtggcggaggtgcgcgccaagctggaggagcaggcccagcagatacgcctgcaggccgaggccttccaggcccgcctcaagagctggttcgagcccctggtggaagacatgcagcgccagtgggccgggctggtggagaaggtgcaggctgccgtgggcaccagcgccgcccctgtgcccagcgacaatcactgaacgccgaagcctgcagccatgcgaccccacgccaccccgtgcctcctgcctccgcgcagcctgcagcgggagaccctgtccccgccccagccgtcctcctggggtggaccctagtttaataaagattcaccaagtttcacgcaaaaaaaaaa

SEQ ID NO: 257 - DNA, 1385 bp, Homo sapiens
  misc_feature: Incyte ID No: 3130485CB1
gaaatgaggcaacatctaactggaaactcgctcaaagtaaggaagtggatgagaagactcagggtcccttttctcttccccgtcttctctcagccacatctctcttatcctatcttggtgaagaagcttgcttggctaggagagaggtcagggacgagaagatagtgacgagaaagttccatgagactctcagaagtcccagcctgaacatcaaacctgaataaccaggagagacgtaacctcggcatactttcagtggtttacctcctgcccacgctgcaggtttttcaggtccttgctcgagtgtgtgctcataggcgtaaataaacgtgctatcagcagcctgcgtcagccagcccagctatttaagcaggctggcatcagcaaacacagcttccaaacccagggcttgcgcttgcctttgcctcttccaccgcgcagggaccatgtcggcggagaccgcgagcggccccacagaggaccaggtggaaatcctggagtacaacttcaacaaggtcgacaagcacccggattccaccacgctgtgcctcatcgcggccgaggcaggcctttccgaggaggagacccagaaatggtttaagcagcgcctggcaaagtggcggcgctcagaaggcctgccctcagagtgcagatccgtcacagactaaggagatggcaggcattgacagcttcactccatgaaggccatctctgtttctctcctccgcttaaccaagctgttgtggtttttcagcatagtgttgtatgttccattgctagctgtcctgctgtttaacacagtgttgtattttttttctaaatgtacataattagaaaagaaaataacaataggaagctatgtgtatcttctgtgtaaagcagtggcttcactggaaaaatggtgtggctagcatttccctttgagtcatgatgacagatggtgtgaaaaccatctaagtttgcttttgaccatcacctcccagtagcaatttgctttcataatccatttagcaatccaggcctctgttgaaaagataatatgagggagaagggaacacatttccttctgaacttacttccctaagtcactttccttatgtatcatctaatacaatgatggttgagtgaaaatacagaaggggtgtttgagtattcagatttcataaaacacttccttggaatatagctgcattaacttggaaagaagcctgttgggccagaagacagaaactccaactggcaaaaaagcaagcatctaagaaaaaaaaccaccaaagttcttgaatttactatatttaaatgcattggttaagtttattttgctaaataaagtgaactgctttttgtctctaaaatgatattctaaataaaaccttaactttttg

SEQ ID NO: 258 - DNA, 2398 bp, Homo sapiens
  misc_feature: Incyte ID No: 1330234.11
agaaaacctcatgacacaatctctccgcctccctgtgttggtggaggatgtctgcagcagcatttaaattctgggagggcttggttgtcagcagcagcaggaggaggcagagcacagcatcgtcgggaccagactcgtctcaggccagttgcagccttctcagccaaacgccgaccaaggaaaactcactaccatgagaattgcagtgatttgcttttgcctcctaggcatcacctgtgccataccagttaaacaggctgattctggaagttctgaggaaaagcagctttacaacaaatacccagatgctgtggccacatggctaaaccctgacccatctcagaagcagaatctcctagccccacagaatgctgtgtcctctgaagaaaccaatgactttaaacaagagacccttccaagtaagtccaacgaaagccatgaccacatggatgatatggatgatgaagatgatgacgaccatgtggacagccaggactccattgactcgaacgactctgatgatgtagatgacactgatgattctcaccagtctgatgagtctcaccattctgatgaatctgatgaactggtcactgattttcccacggacctgccagcaaccgaagttttcactccagttgtccccacagtagacacatatgatggccgaggtgatagtgtggtttatggactgaggtcaaaatctaagaagtttcgcagacctgacatccagtaccctgatgctacagacgaggacatcacctcacacatggaaagcgaggagttgaatggtgcatacaaggccatccccgttgcccaggacctgaacgcgccttctgattgggacagccgtgggaaggacagttatgaaacgagtcagctggatgaccagagtgctgaaacccacagccacaagcagtccagattatataagcggaaagctaatgatgagagcaatgagcattccgatgtgattgatagtcaggaactttccaaagtcagccgtgaattccacagccatgaatttcacagccatgaagatatgctggttgtagaccccaaaagtaaggaagaagataaacacctgaaatttcgtatttctcatgaattagatagtgcatcttctgaggtcaattaaaaggagaaaaaatacaatttctcactttgcatttagtcaaaagaaaaaatgctttatagcaaaatgaaagagaacatgaaatgcttctttctcagtttattggttgaatgtgtatctatttgagtctggaaataactaatgtgtttgataattagtttagtttgtggcttcatggaaactccctgtaaactaaaagcttcagggttatgtctatgttcattctatagaagaaatgcaaactatcactgtattttaatatttgttattctctcatgaatagaaatttatgtagaagcaaacaaaatacttttacccacttaaaaagagaatataacattttatgtcactataatcttttgttttttaagttagtgtatattttgttgtgattatctttttttacattcaagataaaagatttattcacaccacaaaaagataatcacaacaaaatatacactaacttaaaaaacaaaagattatagtgacataaaatgttataccccctttttaagtgggtaaaagtattttgtttgcgtctacataaatttctattcatgagagaataacaaatattaaaatacagtgatagtttgcatttcttctatagaatgaacacagacataaccctgaagcttttagtttacagggagtttccatgaagccacaaactaaactaattatcaaacacatcagttatttccagactcaaatagatacacattcaaccaataaactgagaaagaagcatttcatgttctctttcattttgctataaagcatttttttcttttgactaaatgcaaagtgagaaattgtattttttctccttttaattgacctcagaagatgcactatctaattcatgagaaatacgaaatttcaggtgtttatcttcttccttacttttggggtctacaaccagcatatcttcatagctgtgaaattcatggctgtggaattcacggctgactttggaaagttcctgactatcaatcacatcggaatgctcattgctctcatcattagctttccgcttatataatctggactgcttgtggctgtgggtttcagcactctggtcatccagctttccatgtgtgaggtgatgtcctcgtctgtagcatcagggtactggatgtcaggtctgcgaaacttcttagattttgacctcagtccataaaccacactatcacctcggccatcaatgtgtctactgtggggacaactggagtgaaaacttcggttgctgggcaacgg

SEQ ID NO: 259 - DNA, 1450 bp, Homo sapiens
  misc_feature: Incyte ID No: 1943624CB1
gcagcagcagcggcggcggaaaccctaaagtccgagtccggactacgagtgcgtggcctcctaatccggatcctagtcctgagcgtgtctgtgtgcgagtggacggtcccggacgcgatgaccctgaacggcggcggcagcggagcgggcgggagccgcggtgggggccaggagcgcgagcgccgtcggggcagcacaccctggggccccgccccgccgctgcaccgccgcagcatgccggtggacgagcgcgacctgcaggcggcgctgaccccgggtgccctgacggcggccgcggccgggacggggacccagggtcccaggctggactggcccgaggactccgaggactcgctcagctcagggggcagcgactcagacgagagcgtttacaaggtgctgctgctgggggcgcccggcgtgggcaagagcgccctggcgcgcatcttcggcggtgtggaggacgggcctgaagcagaggcagcagggcacacctatgatcgctccattgtagtggacggagaagaggcatcactcatggtctacgacatttgggagcaggacgggggccgctggttgcccggccactgcatggccatgggggatgcctatgtcattgtgtactcagtgacggacaagggcagcttcgagaaggcctcagaactgcgggtccagctgcggcgtgcacggcaaacagatgatgtgcccatcatcctcgtgggcaacaagagcgacctggtgcgctctcgtgaggtctcggtggatgagggccgggcctgcgcggtggtctttgactgcaagttcattgagacatcagcggcattgcaccacaatgtccaggcgctgtttgaaggtgtcgtgcgccagatacgcctgcgcagggacagcaaagaagccaacgcacgacggcaagcaggcacccggaggcgagagagccttggcaaaaaggcgaagcgcttcttgggccgcatcgtagctcgtaacagccgcaagatggcctttcgcgccaaatccaagtcctgccacgacctctcggttctctaggtcccacccgctcccactatggtgggagacgaacggaagggttggtgggctggcccagccaactgccccgggtgcctcagagcaggctcagactctgggtccctcggagctgccagccgggcacccccaacctcatggtcatggacagatagacagtgctgccctgcgaagtggctctcaggggccagtgagggctgggcccacagagatgcatgcgcaggctcatatgcgtcccaagcagccgcagcgcagccgccgggcaggcctgcgtgccgggagaggactctgcctttttttcacagcccgggtgtgcctgccctggagggaggctcttcagtgcggtagctatttgtttacatgcagatttttgtaataaaggctatttcctgataaaaaaaaaaaaaaa

SEQ ID NO: 260 - DNA, 1045 bp, Homo sapiens
  misc_feature: Incyte ID No: 2189816CB1
gagcacggagattcggcacgaggaggaaaagcagcaaaccagatggagaaggaaggccaaaaagataagtagaaagctggaccatgagctccttgagggcagggactgaatggttactatgtccccagggcccagcatgaccttctcctggattcctcatcttccttctgtgacctgtgtctccatcagtttctcctccggcatctttttcttacaggattcttacctcaggaatagatggacatggcctggcagatgatgcagctgctgcttctggctttggtgactgctgcggggagtgcccagcccaggagtgcgcgggccaggacggacctgctcaatgtctgcatgaacgccaagcaccacaagacacagcccagccccgaggacgagctgtatggccagtgcagtccctggaagaagaatgcctgctgcacggccagcaccagccaggagctgcacaaggacacctcccgcctgtacaactttaactgggatcactgtggtaagatggaacccacctgcaagcgccactttatccaggacagctgtctctatgagtgctcacccaacctggggccctggatccggcaggtcaaccagagctggcgcaaagagcgcattctgaacgtgcccctgtgcaaagaggactgtgagcgctggtgggaggactgtcgcacctcctacacctgcaaaagcaactggcacaaaggctggaattggacctcagggattaatgagtgtccggccggggccctctgcagcacctttgagtcctacttccccactccagccgccctttgtgaaggcctctggagccactccttcaaggtcagcaactatagtcgagggagcggccgctgcatccagatgtggtttgactcagcccagggcaaccccaatgaggaggtggccaagttctatgctgcggccatgaatgctggggccccgtctcgtgggattattgattcctgatccaagaagggtcctctggggttcttccaacaacctattctaatagacaaatccacatgaaaaaaaaaaa

SEQ ID NO: 261 - DNA, 299 bp, Homo sapiens
  misc_feature: Incyte ID No: 039027.1
gtgcggctccctaggccatccactatagcaccattaccgatggttgatggacatgccaaggtattgacctcttaagccagtagtggctggttagagcttggcaaaggagcagccccctcagtttatctcagtgtgccatacaaataatattttctctggatgttacagtgtgaaaaagggtgggaagtagtgccctgttgagccatattagagccccaggcaaaagaaaaaaatgtgcattcctgtatattttttcttctttaatggctaagtttttttccagaatattaaagtagttc

SEQ ID NO: 262 - DNA, 1689 bp, Homo sapiens
  misc_feature: Incyte ID No: 2502336CB1
agaagggagaggcctccttctgaggggcggcttgataccggtggaggttctcgggacaggctaaccaggaggacaggagccccaagaggccccagagcagcactgacgaagacctgcctgtgggtctccatcgcccagctcctgcccacgctcctgactgctgccctgaccagagtcatcatgtctctcgagcagaggagtccgcactgcaagcctgatgaagaccttgaagcccaaggagaggacttgggcctgatgggtgcacaggaacccacaggcgaggaggaggagactacctcctcctctgacagcaaggaggaggaggtgtctgctgctgggtcatcaagtcctccccagagtcctcagggaggcgcttcctcctccatttccgtctactacactttatggagccaattcgatgagggctccagcagtcaagaagaggaagagccaagctcctcggtcgacccagctcagctggagttcatgttccaagaagcactgaaattgaaggtggctgagttggttcatttcctgctccacaaatatcgagtcaaggagccggtcacaaaggcagaaatgctggagagcgtcatcaaaaattacaagcgctactttcctgtgatcttcggcaaagcctccgagttcatgcaggtgatctttggcactgatgtgaaggaggtggaccccgccggccactcctacatccttgtcactgctcttggcctctcgtgcgatagcatgctgggtgatggtcatagcatgcccaaggccgccctcctgatcattgtcctgggtgtgatcctaaccaaagacaactgcgcccctgaagaggttatctgggaagcgttgagtgtgatgggggtgtatgttgggaaggagcacatgttctacggggagcccaggaagctgctcacccaagattgggtgcaggaaaactacctggagtaccggcaggtgcccggcagtgatcctgcgcactacgagttcctgtggggttccaaggcccacgctgaaaccagctatgagaaggtcataaattatttggtcatgctcaatgcaagagagcccatctgctacccatccctttatgaagaggttttgggagaggagcaagagggagtctgagcaccagccgcagccggggccaaagtttgtggggtcagggccccatccagcagctgccctgccccatgtgacatgaggcccattcttcgctctgtgtttgaagagagcaatcagtgttctcagtggcagtgggtggaagtgagcacactgtatgtcatctctgggctcctcgtctattgaatgatttggagctttatccttgctcccttgtgcaattgcacaaatggtcttttaatgctcagtttaaccaacttcaccaccgaagttactccatgacagtactcacacatattgctgtttatgttatttaggagtaagattcttgcttttgactcacatggggaaatccctgctattttgtgaattgggacaagataacatagcagaggaattaataatttttttgaaacttgaacttagcagcaaaatagagctcataaagaaatagtgaaatgaaaatgtagttaattcttgccttatacctctttctctctcctgtaaaattaaaatatatacatgtatacctggatttgcttggcttctgggtggatgtaagagggc

SEQ ID NO: 263 - DNA, 2196 bp, Homo sapiens
  misc_feature: Incyte ID No: 3592543CB1
ggctggataagggctcagagttgcactgagtgtggctgaagcagcgaggcgggagtggaggtgcgcggagtcaggcagacagacagacacagccagccagccaggtcggcagtatagtccgaactgcaaatcttattttcttttcaccttctctctaactgcccagagctagcgcctgtggctcccgggctggtgtttcgggagtgtccagagagcctggtctccagccgcccccgggaggagagccctgctgcccaggcgctgttgacagcggcggaaagcagcggtacccacgcgcccgccgggggaagtcggcgagcggctgcagcagcaaagaactttcccggctgggaggaccggagacaagtggcagagtcccggagcgaacttttgcaagcctttcctgcgtcttaggcttctccacggcggtaaagaccagaaggcggcggagagccacgcaagagaagaaggacgtgcgctcagcttcgctcgcaccggttgttgaacttgggcgagcgcgagccgcggctgccgggcgccccctccccctagcagcggaggaggggacaagtcgtcggagtccgggcggccaagacccgccgccggccggccactgcagggtccgcactgatccgctccgcggggagagccgctgctctgggaagtgagttcgcctgcggactccgaggaaccgctgcgcccgaagagcgctcagtgagtgaccgcgacttttcaaagccgggtagcgcgcgcgagtcgacaagtaagagtgcgggaggcatcttaattaaccctgcgctccctggagcgagctggtgaggagggcgcacggggacgacagccagcgggtgcgtgcgctcttagagaaactttccctgtcaaaggctccggggggcgcgggtgtcccccgcttgccagagccctgttgcggccccgaaacttgtgcgcgcacccaaactaacctcacgtgaagtgacggactgttctatgactgcaaagatggaaacgaccttctatgacgatgccctcaacgcctcgttcctcccgtccgagagcggaccttatggctacagtaaccccaagatcctgaaacagagcatgaccctgaacctggccgacccagtggggagcctgaagccgcacctccgcgccaagaactcggacctcctcacctcgcccgacgtggggctgctcaagctggcgtcgcccgagctggagcgcctgataatccagtccagcaacgggcacatcaccaccacgccgacccccacccagttcctgtgccccaagaacgtgacagatgagcaggagggcttcgccgagggcttcgtgcgcgccctggccgaactgcacagccagaacacgctgcccagcgtcacgccggcggcgcagcggtgcaacggggcaggcatggtggctcccgcggtagcctcggtggcagggggcagcggcagcgtcggcttcagcgccagcctgcacagcgagccgccggtctacgcaaacctcagcaacttcaacccaggcgcgctgagcagcggcggcggggcgccctcctacggcgcggccggcctggcctttcccgcgcaaccccagcagcagcagcagccgccgcaccacctgccccagcagatgcccgtgcagcacccgcggctgcaggccctgaaggaggagcctcagacagtgcccgagatgcccggcgagacaccgcccctgtcccccatcgacatggagtcccaggagcggatcaaggcggagaggaagcgcatgaggaaccgcatcgctgcctccaagtgccgaaaaaggaagctggagagaatcgcccggctggaggaaaaagtgaaaaccttgaaagctcagaactcggagctggcgtccacggccaacatgctcagggaacaggtggcacagcttaaacagaaagtcatgaaccacgttaacagtgggtgccaactcatgctaacgcagcagttgcaaacattttgaagagagaccgtcgggggctgaggggcaacgaagaaaaaaaataacacagagagacagacttgagaacttgacaagttgcgacggagagaaaaaagaagtgtccgagaactaaagccaagggtatccaagttggactgggttgcgtcctgacggcgcccccagtgtgcacgagtgggaaggacttggcgcgccctcccttggcgtggagccagg

SEQ ID NO: 264 - DNA, 2401 bp, Homo sapiens
  misc_feature: Incyte ID No: 399589.1
  unsure 1351-1385, 1951, 1955, 1959, 1962, 1965: a, t, c, g, or other
gcggccgcgtcgacgctagaggggctgcttgcgccaggcgccggccgccccactgcgggtccctggcggccggtgtctgaggagtcggagagccgaggcggccagaccgtgcgccccgcgcttctcccgaggccgttccgggtctgaactgtaacagggaggggcctcgcaggagcagcagcgggcgagttaaagtatgctgggagcggtgaagatggaagggcacgagccgtccgactggagcagctactatgcagagcccgagggctactcctccgtgagctacatggacgccggcctggggatgaccggcatgaacacgtacatgagcatgtcgccggcccccatgggcagcggctcgggcaacatgagcgcgggctccatgaacatgtcgtcgtacgtgggcgctggcatgagcccgtcctggcggggatgtcccccggcgcgggcgccatggcgggcatgggcggctcggccggggcggccggcgtggcgggcatggggccgcacttgagtcccagcctgagcccgctcggggggcaggcggccggggccatgggcggcctggccccctacgccaacatgaactccatgagccccatgtacgggcaggcgggcctgagccgcgcccgcgaccccaagacctacaggcgcagctacacgcacgcaaagccgccctactcgtacatctcgctcatcaccatggccatccagcagagccccaacaagatgctgacgctgagcgagatctaccagtggatcatggacctcttccccttctaccggcagaaccagcagcgctggcagaactccttccgcactcgctctccttcaacgactgtttcctgaaggtgccccgctcgccgacaagcccggcaagggctccttctggaccctgcaccctgactcgggcaacatgttcgagaacggctgctacctgcgccgcagaagcgcttcaagtgcgagaagcagctggcgctgaaggaggccgcaggcgccgccggcagcggcaagaaggcggccgccggagcccaggcctcacaggctcaactcggggaggccgccgggccggcctccgagactccggcgggcaccgagtcgcctcactcgagcgcctccccgtgccaggagcacaagcgagggggcctgggagagctgaaggggacgccggctgcggcgctgagccccccagagccggcgccctctcccgggcagcagcagcaggccgcggccacctgctgggcccgccccaccacccgggcctgccgcctgaggcccacctgaagccggaacaccactacgccttcaaccacccgttctccatcaacaacctcatgtcctcggagcagcnnnnnnnnnnnnnnnnnnnnnnnnnnnnnnnnnnnaaaatggacctcaaggcctacgaacaggtgatgcactaccccggctacggttcccccatgcctggcagcttggccatgggcccggtcacgaacaaaacgggcctggacgcctcgcccctggccgcagatacctcctactaccagggggtgtactcccggcccattatgaactcctcttaagaagacgacggcttcaggcccggctaactctggcaccccggatcgaggataagtgagagagcaagtgggggtcgagactttggggagacggtgttgcagagacgcaagggagaagaaatccataacacccccaccccaacacccccaagacagcagtcttcttcacccgctgcagctgttccgtcccaaacagagggccacacagataccccacgttctatataaggaggaaaacgggaaagaatataaagttaaaaaaaaagcctccggtttccactactgtgtagactcctgcttcttcaagcacctgcagattctgattttttgtggtgtgttctcctccattgctgttgttgcagggaagtcttacttaaaaaaaaaaaaantttngtgngtnacncggtgtaaaaccatgtagttttaacagaaccagagggttgtactattgtttaaaaacaggaaaaaaaataatgtaagggtctgttgtaaatgaccaagaaaaagaaaaaaaaagcattcccaatcttgacacggtgaaatccaggtctcgggtccgattaatttatggtttctgcgtgctttatttatggcttataaatgtgtattctggctgcaagggccagagttccacaaatctatattaaagtgttatacccggttttatcccttgaatcttttcttccagatttttcttttctttacttggcttacaaaatatacaggcttggaaattatttcaagaaggagggagggataccctgtctggttgcaggttgtattttattttggcccagggagtgttgctgttttcccaacattttattaataaaattttc

SEQ ID NO: 265 - DNA, 1632 bp, Homo sapiens
  misc_feature: Incyte ID No: 2175401CB1
ttgcagtagtgttagactgaagataaagtaagtgctgtttgggctaacaggatctcctcttgcagtctgcagcccaggacgctgattccagcagcgccttaccgcgcacccgaagattcactatggtgaaaatcgccttcaatacccctaccgccgtgcaaaaggaggaggcgcggcaagacgtggaggccctcctgagccgcacggtcagaactcagatactgaccggcaaggagctccgagttgccacccaggaaaaagagggctcctctgggagatgtatgcttactctcttaggcctttcattcatcttggcaggacttattgttggtggagcctgcatttacaagtacttcatgcccaagagcaccatttaccgtggagagatgtgcttttttgattctgaggatcctgcaaattcccttcgtggaggagagcctaacttcctgcctgtgactgaggaggctgacattcgtgaggatgacaacattgcaatcattgatgtgcctgtccccagtttctctgatagtgaccctgcagcaattattcatgactttgaaaagggaatgactgcttacctggacttgttgctggggaactgctatctgatgcccctcaatacttctattgttatgcctccaaaaaatctggtagagctctttggcaaactggcgagtggcagatatctgcctcaaacttatgtggttcgagaagacctagttgctgtggaggaaattcgtgatgttagtaaccttggcatctttatttaccaactttgcaataacagaaagtccttccgccttcgtcgcagagacctcttgctgggtttcaacaaacgtgccattgataaatgctggaagattagacacttccccaacgaatttattgttgagaccaagatctgtcaagagtaagaggcaacagatagagtgtccttggtaataagaagtcagagatttacaatatgactttaacattaaggtttatgggatactcaagatatttactcatgcatttactctattgcttatgctttaaaaaaaggaaaaaaaaaaaaaactactaaccactgcaagctcttgtcaaattttagtttaattggcattgcttgttttttgaaactgaaattacatgagttccattttttctttgaatttatagggtttagatttctgaaagcagcatgaatatatcacctaacatcctgacaataaattccatccgttgttttttttgtttgtttgttttttcttttcctttaagtaagctctttattcatcttatggtggagcaattttaaaatttgaaatattttaaattgtttttgaactttttgtgtaaaatatatcagatctcaacattgttggtttcttttgtttttcattttgtacaactttcttgaatttagaaattacatctttgcagttctgttaggtgctctgtaattaacctgacttatatgtgaacaattttcatgagacagtcatttttaactaatgcagtgattctttctcactactatctgtattgtggaatgcacaaaattgtgtaggtgctgaatgctgtaaggagtttaggttgtatgaattctacaaccctataataaattttactctatacaaaaaaaaaaaa

SEQ ID NO: 266 - DNA, 2115 bp, Homo sapiens
  misc_feature: Incyte ID No: 084455.9
aggtccggcccggagcggccatgtcccacggccccaagcagcccggcgcggccgccgcgccggcgggcggcaaggctccgggccagcatgggggcttcgtggtgactgtcaagcaagagcgcggcgagggtccacgcgcgggcgagaaggggtcccacgaggaggaggtgagagtccctgcgctgagctgggggaggccccgggctcccgccccagcctcgaagccccgccccaggctggatttgaattgcttgtggctccgcccacagcccattttcctctggaagctgagaccccgccccgtgccagctgccacgcccctgacaggtcctctgccactctaagtccaggccccgcccaccgcacaatgccagctctgcccactctaaggtcccgcccacttccactccttgggggcggcaccctccccttggtcctgtgggcccgttctccagcagaaaaccacgcccaccaagcagaggccacgcccacaaccgaagtcaacgccaaccctgtactcaaacctcggcccatagttcctcagatcccctcacccctggccagggatccctctaacccaccgtgtcccgactgctgaccgggccctacctccatcttttccgggttcttcctcccagctaggccccgcccccatccccgcccatacgcgttaggccccgcccatgcccctctgagccctgccccagtacgccaggcccccctcccaacgacgcagcccggttctgcagccggtgaagaaacgcggctggcccaagggcaagaagcggaagaagattctgccgaatggggcccaaggcaccggtcacgggctacgtgcgcttcctgaacgagcggcgcgagcagatccgcacgcgccacccggatctgccctttcccgagatcaccaagatgctgggcgccgagtggagcaagctgcagccaacggaaaagcagcggtacctggatgaggccgagagagagaagcagcagtacatgaaggagctgcgggcgtaccagcagtctgaagcctataagatgtgcacggagaagatccaggagaagaagatcaagaaagactcgagctctgggctcatgaacactctcctgaatggacacaagggtggggactgcgatggcttctccaccttcgatgttcccatcttcactgaagagttcttggaccaaaacaaagcgcgtgaggcggacttcggcgcttgcggaagatgaatgtggccttcgaggagcagaacgcggtactgcagaggcacacgcagagcatgagcagcgcgcgcgaggtctgggagcaggagctggcgctggaggagcggaggacgctggcgctgcagcagcagcttccaggccgtgcgccaggcgctcaccgccagcttcgcctcactgccggtgccgggcacgggcgaaacgcccacgctgggcactctggacttctacatggcccggcttcacggagccatcgagcgcgaccccgcccagcacgagaagctcatcgtccgcatcaaggaaatcctggcccaggtcgccagcgagcacctgtgaggagtgggcgggcccacgatgcagaggagaagctgtgggcgcggccctgccacaccccaccccgtggacgagaggctgggggtccaccctttggggcctggtcccatcctgcaccttgggggctccagcccccctaaaattaaatttctgcagcatccctttagctttcaatctccccagccccctgaacccggaaaaagcactcgctgcgcggatacacccagaagaacctcacagccgagggtgcccctcctcggaggacagccacgcgctacactggctctccgggccacccccaggacacagggcagacgaaacccacccccagcacacggcaggaccccccaaattactcactacggggggctgtgccataggccacacaggaagctgccttgtggggacttacctggggtgtcccccgcatgcctgtaccccagatgggtgggggccggctttgcccatcctgctctcctccagctgagggaccctggtgggggtggctccttctcactgctggatccggactttttaaataaaaacaagtaaaatttgtgtttt

SEQ ID NO: 267 - DNA, 3475 bp, Homo sapiens
  misc_feature: Incyte ID No: 233041.5
gttgaaggcccatcgcccccgggtccctgccctgccccagaaagcgttccccaagagagctaggagtcctgcgcacctggagcgcgctccgcgtcacgcccagagggcgctgcacactcgcgcccgaggactgcctgccccccttcagcccctctcccgggctgcgcctccgcactccgggcccgggcagaagggggtgcgcctcggccccaccacccagggagcagccgagctgaaaggccgggaaccgcggcttgcggggaccacagctcccgaaagcgacgttcggccaccggaggagcgggagccaagcaggcggagctcggcgggagaggtgcgggccgaatccgagccgagcggagaggaatccggcagtagagagcggactccagccggcggaccctgcagccctcgcctgggacagcggcgcgctgggcaggcgcccaagagagcatcgagcagcggaacccgcgaagccggcccgcagccgcgacccgcgcagcctgccgctctcccgccgccggtccgggcagcatgaggcgcgcggcgctctggctctggctgtgcgcgctggcgctgagcctgcagccggccctgccgcaaattgtggctactaatttgccccctgaagatcaagatggctctggggatgactctgacaacttctccggctcaggtgcaggtgctttgcaagatatcaccttgtcacagcagaccccctccacttggaaggacacgcagctcctgacggctattcccacgtctccagaacccaccggcctggaggctacagctgcctccacctccaccctgccggctggagaggggcccaaggagggagaggctgtagtcctgccagaagtggagcctggcctcaccgcccgggagcaggaggccaccccccgacccagggagaccacacagctcccgaccactcatcaggcctcaacgaccacagccaccacggcccaggagcccgccacctcccacccccacagggacatgcagcctggccaccatgagacctcaacccctgcaggacccagccaagctgaccttcacactccccacacagaggatggaggtccttctgccaccgagagggctgctgaggatggagcctccagtcagctcccagcagcagagggctctggggagcaggacttcacctttgaaacctcgggggagaatacggctgtagtggccgtggagcctgaccgccggaaccagtccccagtggatcagggggccacgggggcctcacagggcctcctggacaggaaagaggtgctgggaggggtcattgccggaggcctcgtggggctcatctttgctgtgtgcctggtgggtttcatgctgtaccgcatgaagaagaaggacgaaggcagctactccttggaggagccgaaacaagccaacggcggggcctaccagaagcccaccaaacaggaggaattctatgcctgacgcgggagccatgcgccccctccgccctgccactcactaggcccccacttgcctcttccttgaagaactgcaggccctggcctcccctgccaccaggccacctccccagcattccagcccctctggtcgctcctgcccacggagtcgtggggtgtgctgggagctccactctgcttctctgacttctgcctggagacttagggcaccaggggtttctcgcataggacctttccaccacagccagcacctggcatcgcaccattctgactcggtttctccaaactgaagcagcctctccccaggtccagctctggaggggagggggatccgactgctttggacctaaatggcctcatgtggctggaagatcctgcgggtggggcttggggctcacacacctgtagcacttactggtaggaccaagcatcttgggggggtggccgctgagtggcaggggacaggagtccactttgtttcgtggggaggtctaatctagatatcgacttgtttttgcacatgtttcctctagttctttgttcatagcccagtagaccttgttacttctgaggtaagttaagtaagttgattcggtatccccccatcttgcttccctaatctatggtcgggagacagcatcagggttaagaagacttttttttttttcttttaaactaggagaaccaaatctggaagccaaaatgtaggcttagtttgtgtgttgtctcttgagtttgtcgctcatgtgtgcaacagggtatggactatctgtctggtggccccgtttctggtggtctgttggcaggctggccagtccaggctgccgtggggccgccgcctctttcaagcagtcgtgcctgtgtccatgcgctcagggccatgctgaggcctgggccgctgccacgttggagaagcccgtgtgagaagtgaatgctgggactcagccttcagtcctctctgtctgaatgctgggactcagccttcagacagagaggactgtagggagggcggcaggggcctggagatcctcctgcagaccacgcccgtcctgcctgtggcgccgtctccaggggctgcttcctcctggaaattgacgaggggtgtcttgggcagagctggctctgagcgcctccatccaaggccaggttctccgttagctcctgtggccccaccctgggccctgggctggaatcaggaatattttccaaagagtgatagtcttttgcttttggcaaaactctacttaatccaatgggtttttccctgtacagtagattttccaaatgtaataaactttaatataaagtagtcctgtgaatgccactgccttcgcttcttgcctctgtgctgtgtgtgacgtgaccggacttttctgcaaacaccaacatgttgggaaacttggctcgaatctctgtgccttcgtctttcccatggggagggattctggttccagggtccctctgtgtatttgcttttttgttttggctgaaattctcctggaggtcggtaggttcagccaaggttttataaggctgatgtcaatttctgtgttgccaagctccaagccccatcttctaaatggcaaaggaaggtggatggccccagcacagcttgacctgaggctgtggtcacagcggaggtgtggagccgaggcctaccccgcagacaccttggacatcctcctcccacccggctgcagaggccagaggcccccagcccagggctcctgcacttacttgcttatttgacaacgtttcagcgactccgttggccactccgagaggtgggccagtctgtggatcagagatgcaccaccaagccaagggaacctgtgtccggtattcgatactgcgactttctgcctggagtgtatgactgcacatgactcgggggtggggaaaggggtcggctgaccatgctcatctgctggtccgtgggacggtgcccaagccagaggctgggttcatttgtgtaacgacaataaacggtacttgtcatttcgggcaacggc

SEQ ID NO: 268 - DNA, 1051 bp, Homo sapiens
  misc_feature: Incyte ID No: 1382961.5
agcaaatgccttctccctgcatgctccctgcaaggcctcctcgctatctccacacacctgactcatcccattttacaggagcagttgatcccaggaagagcattggagcctccagcaggggctgttggggcctgtctgaggagataggatgcgtcaggcagccccagacacgatcacattcctctcaacatgcctgccgggccgggtatccatcccctgcagcagcaggcttcctctacgtggatgttaaaggcccattcagttcatggagagctagcaggtgcgtgctctggaggaggccaacgccgacctggaagtgaagatccgtgactggtaccagaggcagcggcctgctgagatcaaagactacagtccctacttcaagaccattgaggacctgaggaacaagattctcacagccacagtggacaatgccaatgtccttctgcagattgacaatgcccgtctggccgcggatgacttccgcaccaagtatgagacagagttgaacctgcgcatgagtgtggaagccgaccatcaatggcctgcgcagggtgctggacgaactgacctggccagagctgacctggagatgcagattgagagcctgaaggaggagctggcctacctgaagaagaaccacgaggaggagatgaatgccctgagaggccaggtgggtggagatgtcaatgtggagatggacgctgcacctggcgtggacctgagccgcattctgaacgagatgcgtgaccagtatgagaagatggcagagaagaaccgcaaggatgccgaggaatggttcttcaccaagacagaggagctgaaccgcgaggtggccaccaacagcgagctggtgcagagcggcaagagcgagatctcggagctccggcgcaccatgcagaacctggagatgattggcagcgtggaggagcagctggcccagctccgctgcgagatggagcagcagaaccaggagtacaagatcctgctggacgtgaagacgcggctggagcaggagatcgccacctaccgccgcctgctggagggcgag

SEQ ID NO: 269 - DNA, 2278 bp, Homo sapiens
  misc_feature: Incyte ID No: 1518310CB1
ggctcctctccccgactcggagcccctcggcggcgcccggcccaggacccgcctaggagcgcaggagccccagcgcagagaccccaacgccgagacccccgccccggccccgccgcgcttcctcccgacgcagagcaaaccgcccagagtagaagatggattggggcacgctgcagacgatcctggggggtgtgaacaaacactccaccagcattggaaagatctggctcaccgtcctcttcatttttcgcattatgatcctcgttgtggctgcaaaggaggtgtggggagatgagcaggccgactttgtctgcaacaccctgcagccaggctgcaagaacgtgtgctacgatcactacttccccatctcccacatccggctatgggccctgcagctgatcttcgtgtccacgccagcgctcctagtggccatgcacgtggcctaccggagacatgagaagaagaggaagttcatcaagggggagataaagagtgaatttaaggacatcgaggagatcaaaacccagaaggtccgcatcgaaggctccctgtggtggacctacacaagcagcatcttcttccgggtcatcttcgaagccgccttcatgtacgtcttctatgtcatgtacgacggcttctccatgcagcggctggtgaagtgcaacgcctggccttgtcccaacactgtggactgctttgtgtcccggcccacggagaagactgtcttcacagtgttcatgattgcagtgtctggaatttgcatcctgctgaatgtcactgaattgtgttatttgctaattagatattgttctgggaagtcaaaaaagccagtttaacgcattgcccagttgttagattaagaaatagacagcatgagagggatgaggcaacccgtgctcagctgtcaaggctcagtcgctagcatttcccaacacaaagattctgaccttaaatgcaaccatttgaaacccctgtaggcctcaggtgaaactccagatgccacaatggagctctgctcccctaaagcctcaaaacaaaggcctaattctatgcctgtcttaattttctttcacttaagttagttccactgagaccccaggctgttaggggttattggtgtaaggtactttcatattttaaacagaggatatcggcatttgtttctttctctgaggacaagagaaaaaagccaggttccacagaggacacagagaaggtttgggtgtcctcctggggttctttttgccaactttccccacgttaaaggtgaacattggttctttcatttgctttggaagttttaatctctaacagtggacaaagttaccagtgccttaaactctgttacactttttggaagtgaaaactttgtagtatgataggttattttgatgtaaagatgttctggataccattatatgttccccctgtttcagaggctcagattgtaatatgtaaatggtatgtcattcgctactatgatttaatttgaaatatggtcttttggttatgaatactttgcagcacagctgagaggctgtctgttgtattcattgtggtcatagcacctaacaacattgtagcctcaatcgagtgagacagactagaagttcctagtgatggcttatgatagcaaatggcctcatgtcaaatatttagatgtaattttgtgtaagaaatacagactggatgtaccaccaactactacctgtaatgacaggcctgtccaacacatctcccttttccatgactgtggtagccagcatcggaaagaacgctgatttaaagaggtcgcttgggaattttattgacacagtaccatttaatggggaggacaaaatggggcaggggagggagaagtttctgtcgttaaaaacagatttggaaagactggactctaaattctgttgattaaagatgagctttgtctacttcaaaagtttgtttgcttaccccttcagcctccaattttttaagtgaaaatataactaataacatgtgaaaagaatagaagctaaggtttagataaatattgagcagatctataggaagattgaacctgaatattgccattatgcttgacatggtttccaaaaaatggtactccacatacttcagtgagggtaagtattttcctgttgtcaagaatagcattgtaaaagcattttgtaataataaagaatagctttaatgatatgcttgtaactaaaataattttgtaatgtatcaaatacatttaaaacattaaaatataatctctatagtaacgaacagaaaa

SEQ ID NO: 270 - DNA, 1025 bp, Homo sapiens
  misc_feature: Incyte ID No: 1517817CB1
ctgctgggcagcccacagggtccctgggcggagggcaggagcatccagttggagttgacaacaggaggcagaggcatcatggagggtccccggggatggctggtgctctgtgtgctggccatatcgctggcctctatggtgaccgaggacttgtgccgagcaccagacgggaagaaaggggaggcaggaagacctggcagacgggggcggccaggcctcaagggggagcaaggggagccgggggcccctggcatccggacaggcatccaaggccttaaaggagaccagggggaacctgggccctctggaaaccccggcaaggtgggctacccagggcccagcggccccctcggggcccgtggcatcccgggaattaaaggcaccaagggcagcccaggaaacatcaaggaccagccgaggccagccttctccgccattcggcggaaccccccaatggggggcaacgtggtcatcttcgacacggtcatcaccaaccaggaagaaccgtaccagaaccactccggccgattcgtctgcactgtacccggctactactacttcaccttccaggtgctgtcccagtgggaaatctgcctgtccatcgtctcctcctcaaggggccaggtccgacgctccctgggcttctgtgacaccaccaacaaggggctcttccaggtggtgtcagggggcatggtgcttcagctgcagcagggtgaccaggtctgggttgaaaaagaccccaaaaagggtcacatttaccagggctctgaggccgacagcgtcttcagcggcttcctcatcttcccatctgcctgagccagggaaggaccccctcccccacccacctctctggcttccatgctccgcctgtaaaatgggggcgctattgcttcagctgctgaagggagggggctggctctgagagccccaggactggctgccccgtgacacatgctctaagaagctcgtttcttagacctcttcctggaataaacatctgtgtctgtgtctgctgaaaaaaaaaa

SEQ ID NO: 271 - DNA, 1097 bp, Homo sapiens
  misc_feature: Incyte ID No: 3090387CB1
gcctgttcctcctgggtgtcactggcagccctgtccttcctagagggactggaacctaattctcctgaggctgagggagggtggagggtctcaaggcaacgctggccccacgacggagtgccaggagcactaacagtacccttagcttgctttcctcctccctcctttttattttcaagttcctttttatttctccttgcgtaacaaccttcttcccttctgcaccactgcccgtacccttacccgccccgccacctccttgctaccccactcttgaaaccacagctgttggcagggtccccagctcatgccagcctcatctcctttcttgctagcccccaaagggcctccaggcaacatggggggcccagtcagagagccggcactctcagttgccctctggttgagttggggggcagctctgggggccgtggcttgtgccatggctctgctgacccaacaaacagagctgcagagcctcaggagagaggtgagccggctgcaggggacaggaggcccctcccagaatggggaagggtatccctggcagagtctcccggagcagagttccgatgccctggaagcctgggagagtggggagagatcccggaaaaggagagcagtgctcacccaaaaacagaagaagcagcactctgtcctgcacctggttcccattaacgccacctccaaggatgactccgatgtgacagaggtgatgtggcaaccagctcttaggcgtgggagaggcctacaggcccaaggatatggtgtccgaatccaggatgctggagtttatctgctgtatagccaggtcctgtttcaagacgtgactttcaccatgggtcaggtggtgtctcgagaaggccaaggaaggcaggagactctattccgatgtataagaagtatgccctcccacccggaccgggcctacaacagctgctatagcgcaggtgtcttccatttacaccaaggggatattctgagtgtcataattccccgggcaagggcgaaacttaacctctctccacatggaaccttcctggggtttgtgaaactgtgattgtgttataaaaagtggctcccagcttggaagacca

SEQ ID NO: 272 - DNA, 918 bp, Homo sapiens
  misc_feature: Incyte ID No: 3836893CB1
agcctctaggtcattgtggtgccttgtagctgtcccgggagccctcagcagcagttggagctggtgcacaggaaggatgaggaagaccaggctctgggggctgctgtggatgctctttgtctcagaactccgagctgcaactaaattaactgaggaaaagtatgaactgaaagaggggcagaccctggatgtgaaatgtgactacacgctagagaagtttgccagcagccagaaagcttggcagataataagggacggagagatgcccaagaccctggcatgcacagagaggccttcaaagaattcccatccagtccaagtggggaggatcatactagaagactaccatgatcatggtttactgcgcgtccgaatggtcaaccttcaagtggaagattctggactgtatcagtgtgtgatctaccagcctcccaaggagcctcacatgctgttcgatcgcatccgcttggtggtgaccaagggtttttcagggacccctggctccaatgagaattctacccagaatgtgtataagattcctcctaccaccactaaggccttgtgcccactctataccagccccagaactgtgacccaagctccacccaagtcaactgccgatgtctccactcctgactctgaaatcaaccttacaaatgtgacagatatcatcagggttccggtgttcaacattgtcattctcctggctggtggattcctgagtaagagcctggtcttctctgtcctgtttgctgtcacgctgaggtcatttgtaccctaggcccacgaacccacgagaatgtcctctgacttccagccacatccatctggcagttgtgccaagggaggagggaggaggtaaaaggcagggagttaataacatgaattaaatctgtaatcaccagctaaaaaaaaaaa

SEQ ID NO: 273 - DNA, 838 bp, Homo sapiens
  misc_feature: Incyte ID No: 394121.2
cccaggggatacaagacactgcagactcccgagagacataacacagaattgcaccatgccaaactacaaactcacttattttaatatgagggggagagcagaaattattcgttacatatttgcttatttggacatacagtatgaagaccacagaatagaacaagctgactggcctgaaatcaaatcaactctcccatttggaaaaatccccattttggaagttgatggacttactcttcaccagagcctagcaatagcaagatatttgaccaaaaacacagatttggctggaaacacagaaatggaacaatgtcatgttgatgctattgtggacactctggatgatttcatgtcatgttttccttgggcagagaaaaagcaagatgtgaaagagcagatgttcaatgagctgctcacgtataatgcgcctcatcttatgcaagacttggacacatatttaggggggagagaatggcttattggtaactctgtaacttgggcagacttctactgggagatttgcagtaccacacttttggtctttaagcctgacctgttagacaaccatccaaggctggtgactttacggaagaaagtccaagccattcctgccgtcgctaactggataaaacgaaggccccaaaccaaactctagctgatccatgttgccttcaagtttgtttttctcgggggcatctctctcatcagataagacagctacatcagcctgccagataatccacatgctccctccccagctccactaagattttcactttagccatattctgatttttaaaaaggaaaataaaaacaaatctttcttcagtatcttttt

SEQ ID NO: 274 - DNA, 859 bp, Homo sapiens
  misc_feature: Incyte ID No: 2347046CB1
  unsure 6: a, t, c, g, or other
cgcggnctcggccggggcaccggtgagtcgccggcgctgcagagggaggcggcactggtctcgacgtggggcggccagcgatgaagccgcccagttcaatacaaacaagtgagtttgactcatcagatgaagagcctattgaagatgaacagactccaattcatatatcatggctatctttgtcacgagtgaattgttctcagtttctcggtttatgtgctcttccaggttgtaaatttaaagatgttagaagaaatgtccaaaaagatacagaagaactaaagagctgtggtatacaagacatatttgttttctgcaccagaggggaactgtcaaaatatagagtcccaaaccttctggatctctaccagcaatgtggaattatcacccatcatcatccaatcgcagatggagggactcctgacatagccagctgctgtgaaataatggaagagcttacaacctgccttaaaaattaccgaaaaaccttaatacactgctatggaggacttgggagatcttgtcttgtagctgcttgtctcctactatacctgtctgacacaatatcaccagagcaagccatagacagcctgcgagacctaagaggatccggggcaatacagaccatcaagcaatacaattatcttcatgagtttcgggacaaattagctgcacatctatcatcaagagattcacaatcaagatctgtatcaagataaaggaattcaaatagcatatatatgaccatgtctgaaatgtcagttctctagcataatttgtattgaaatgaaaccaccagtgttatcaacttgaatgtaaatgtacatgtgcagatattcctaaagttttattgacaaaa

SEQ ID NO: 275 - DNA, 2608 bp, Homo sapiens
  misc_feature: Incyte ID No: 1137894.1
ttcagcgctcccactctcggccgacacccctgcatggccaaccgttacaccatggatctgactgccatctacgaggtgagtccccgccgcacggcatccccggtacctgcatgcctgagtccgagtccccacctctctagcgccgcaaactccagcccgggacgcttgcctcccttctccaactggggctccctagcgccgcgccctccagcctggggcccctgcctcccgctcagaccagcttggtgatttggaggtgaaaatggaacccgcgacacccggctcttcgctcaaacatgggtggggcggcccatgcaagtggaaagtcggagaacttttctcagaccgaggctgcctggaggcggaagtggcccccatacctggctcacccctagtcgttgctgagggcgtggttttgcgcggaggcgtctctggggctgaagtctcagggtggggggatccgacttctgtctctccagtccctgaccgtagagacagagaaccctaaaaccgaagcaatccggacttccaggtcaactttgcccggtttctccagttgtgaaactggagatcccgacgcgtgggtcatatccggggaggacaagagacccaaaattgggaaacagtggtgcgccctgacttcggggtccccctcttggtccagccggggaagccgggattcctgggtccctcgggataaggcctcggtggtgggtaaactcagaacctccaactctgggttcctggcatccggaacccaggggtttctgcgggcgggtggggctcaggcggggagcccacaaaccggcctggcaagctctagttccctgcagctggggtggggcgtcgccctgcattttcaggtgccttaaccgacccatttccgcagagcctcctgtcgctgagccctgacgtgcccgtgccatccgaccatggagggactgagtccagcccaggctggggctcctcgggaccctggagcctgagcccctccgactccagcccgtctggggtcacctcccgcctgcctggccgctccaccagcctagtggagggccgcagctgtggctgggtgcccccaccccctggcttcgcaccgctggctccccgcctgggccctgagctgtcaccctcacccacttcgcccactgcaacctccaccaccccctcgcgctacaagactgagctatgtcggaccttctcagagagtgggcgctgccgctacggggccaagtgccagtttgcccatggcctgggcgagctgcgccaggccaatcgccaccccaaatacaagacggaactctgtcacaagttctacctccagggccgctgcccctacggctctcgctgccacttcatccacaaccctagcgaagacctggcggccccgggccaccctcctgtgcttcgccagagcatcagcttctccggcctgccctctggccgccggacctcaccaccaccaccaggcctggccggcccttccctgtcctccagctccttctcgccctccagctccccaccaccacctggggaccttccactgtcaccctctgccttctctgctgcccctggcacccccctggctcgaagagaccccaccccagtctgttgcccctcctgccgaagggccactcctatcagcgtctgggggcccttgggtggcctggttcggaccccctctgtacagtccctgggatccgaccctgatgaatatgccagcagcggcagcagcctggggggctctgactctcccgtcttcgaggcgggagtttttgcaccaccccagcccgtggcagccccccggcgactccccatcttcaatcgcatctctgtttctgagtgacaaagtgactgcccggtcagatcagctggatctcagcggggagccacgtctcttgcactgtggtctctgcatggaccccagggctgtggggacttgggggacagtaatcaagtaatccccttttccagaatgcattaacccactcccctgacctcacgctggggcaggtccccaagtgtgcaagctcagtattcatgatggtgggggatggagtgtcttccgaggttcttgggggaaaaaaaattgtagcatatttaagggaggcaatgaaccctctcccccacctcttccctgcccaaatctgtctcctagaatcttatgtgctgtgaataataggccttcactgcccctccagtttttatagacctgaggttccagtgtctcctggtaactggaacctctcctgagggggaatcctggtgctcaaattaccctccaaaagcaagtagccaaagccgttgccaaaccccacccataaatcaatgggccctttatttatgacgactttatttattctaatatgattttatagtatttatatatattgggtcgtctgcttcccttgtatttttcttcctttttttgtaatattgaaaacgacgatataattattataagtagactataatatatttagtaatatatattattaccttaaaagtctatttttgtgttttgggcatttttaaataaacaatctgagtgtgttcttcgtagaggaactcgattgaggaccagaggtcctggacctccaaatacaac

SEQ ID NO: 276 - DNA, 1036 bp, Homo sapiens
  misc_feature: Incyte ID No: 1137536.4
cattaaaataaagctctggcccgagtgtggttgcagatttttcttggctatcttaaagagtaaagtaagcaaattacaaatcaaagaaactctgaacctgtggtcttcatccgagagagcctctggtgttcagaaggaaagtctcaagcgttcagactgtggcaggaaccctgtcatggaatctggcagctaaacccgaaagcaagaggcttgaccactgcagaacactcgggtaggtaggaaacaatgaaagagcttccaaaatcaaaatcagaaacccaattccaggacttggtgactgcagtacttcctgcctgtcaccatctagggcagctcagatgtgcagtccagcatgaacacaccttgaggatgaggcagctcatccctgctgctgctctgccgctgatggcacgatcagggcagactaggtttgctgaccaggctaggtgtggaccaccacacctacctttccctaaatggggcccgtggcatgtgtcctttcaaaatgttcccttggcagtgtgctccttgcatggctttgctcctaggacacatccaaaagggtcccctgcacactgtgaagggcttctggggcgtgacctgtctttagtggttctgagtctcaggacttggggctgatgcagggcctctagctgaagggactttgatggaaatgtgcagacacaaatgttgcccaaaggaccacgagtacagcaggtgctgcagttacggggcacgcccattcctaatcattgtgctttgtgtctcctcagggagaaacaaaggcagcgctgccctcgggggagcattggccctggcggaacgcagcagccgcgaaggatccagccagaggatgccacgccagcccaagcgctaccaaggctgcccaaggggggcgggcctgggaagagccctacacggggcaagcacctaggatggggcagagacttgtttgcatctttgtccccagcaaaggctacatgtttacctccttcaattgataataaacctttctgagatgcaaaaaaaaaaaaaa

SEQ ID NO: 277 - DNA, 877 bp, Homo sapiens
  misc_feature: Incyte ID No: 2501808CB1
cgttgctgcgttgtgaggggtgtcagctcagtgcatcccaggcagctcttagtgtggagcagtgaactgtgtgtggttccttctacttggggatcatgcagagagcttcgcgtctgaagagagagctgcacatgttagccacagagccacccccaggcatcacatgttggcaagataaagaccaaatggatgacctgcgagctcaaatattaggtggagccaacacaccttatgagaaaggtgtttttaagctagaagttatcattcctgagaggtacccatttgaacctcctcagatccgatttctcactccaatttatcatccaaacattgattctgctggaaggatttgtctggatgttctcaaattgccaccaaaaggtgcttggagaccatccctcaacatcgcaactgtgttgacctctattcagctgctcatgtcagaacccaaccctgatgacccgctcatggctgacatatcctcagaatttaaatataataagccagccttcctcaagaatgccagacagtggacagagaagcatgcaagacagaaacaaaaggctgatgaggaagagatgcttgataatctaccagaggctggtgactccagagtacacaactcaacacagaaaaggaaggccagtcagctagtaggcatagaaaagaaatttcatcctgatgtttaggggacttgtcctggttcatcttagttaatgtgttctttgccaaggtgatctaagttgcctaccttgaatttttttttaaatatatttgatgacataatttttgtgtagtttatttatcttgtacatatgtattttgaaatcttttaaacctgaaaaataaatagtcatttaatgttgaaaaaaaaaaa

SEQ ID NO: 278 - DNA, 1836 bp, Homo sapiens
  misc_feature: Incyte ID No: 4767318CB1
ttttagaaggttagtgttggttcttttattcgattaaacaggaatacacatatgtctaccaaagaataggtaagggagaaataagaacactaaaaaaactcggaatcgttaagtgtgaagcatatttggagttaaaagaaccaaatattactaagtaagcagacgcgggcacgcgctgcataccgggatttgtagtcccttccggggcggggtacagcgcgcctgcgcagaggggccgtcgctcttccgggcgcatgcgtgcggcagcggcgccaggactgactgcgccgtggaggctgctgcagtgttgtgagttggaagctggggagctcggcatggcggtccccgctgcagccatggggccctcggcgttgggccagagcggccccggctcgatggccccgtggtgctcagtgagcagcggcccgtcgcgctacgtgcttgggatgcaggagctgttccggggccacagcaagacgcgcgagttcctggcgcacagcgccaaggtgcactcggtggcctggagttgcgacgggcgtcgcctagcctcggggtccttcgacaagacggccagcgtcttcttgctggagaaggaccggttggtcaaagaaaacaattatcggggacatggggatagtgtggaccagctttgttggcatccaagtaatcctgacctatttgttacggcgtctggagataaaaccattcgcatctgggatgtgaggactacaaaatgcattgccactgtgaacactaaaggggagaacattaatatctgctggagtcctgatgggcagaccattgctgtaggcaacaaggatgatgtggtgacctttattgatgccaagacacaccgttccaaagcagaagagcagttcaagttcgaggtcaacgaaatctcctggaacaatgacaataatatgttcttcctgacaaatggcaatggttgtatcaacatcctcagctacccagaactgaagcctgtgcagtccatcaacgcccatccttccaactgcatctgtatcaagtttgaccccatggggaagtactttgccacaggaagtgcggatgctttggtcagcctctgggatgtggatgagttagtgtgtgttcggtgcttttccaggctggattggcctgtaagaaccctcagtttcagccatgatgggaaaatgctggcgtcagcatcggaagatcattttattgacattgctgaagtggagacaggggacaaactatgggaggtacagtgtgagtctccgaccttcacagtggcgtggcaccccaaaaggcctctgctggcatttgcctgtgatgacaaagacggcaaatatgacagcagccgggaagccggaactgtgaagctgtttgggcttcctaatgattcttgagaggaggttgtagggagaggaggccccggcagaggtcttccttcatgtggttagtttggtctgttctctcggagttggtgggcaccctaaatatttgtaagttggtataaattgtaaacgtctctggtcaggctgcgcatttcgttcttttgctttgtctgtgtattagctctttccattctttgcccccagcatgagttaactcgcgtggactctgcagtgcgagtagtgaccccagcataccttgtcctctggacctcctgtcttctctgcttctgggtgcatggtagactttgtggcatttgatacaacttggacaatacctagtttggagggaggggaatggaagggcatggaagtttttttaaataattaaaaatatatacatataattttgagaattgagcatttaataaactgacttttgttattatggaaaaaaaaa

SEQ ID NO: 279 - DNA, 1032 bp, Homo sapiens
  misc_feature: Incyte ID No: 1223705CB1
gctcaaagctccattgttagatcctttctgtcctccttcctggctcctccttcctccccacccctctaataggctcataagtgggctcaggcctctctgcggggctcactctgcgcttcaccatggctttcattgccaagtccttctatgacctcagtgccatcagcctggatggggagaaggtagatttcaatacgttccggggcagggccgtgctgattgagaatgtggcttcgctctgaggcacaaccacccgggacttcacccagctcaacgagctgcaatgccgctttcccaggcgcctggtggtccttggcttcccttgcaaccaatttggacatcaggagaactgtcagaatgaggagatcctgaacagtctcaagtatgtccgtcctgggggtggataccagcccaccttcacccttgtccaaaaatgtgaggtgaatgggcagaacgagcatcctgtcttcgcctacctgaaggacaagctcccctacccttatgatgacccattttccctcatgaccgatcccaagctcatcatttggagccctgtgcgccgctcagatgtggcctggaactttgagaagttcctcatagggccggagggagagcccttccgacgctacagccgcaccttcccaaccatcaacattgagcctgacatcaagcgcctccttaaagttgccatatagatgtgaactgctcaacacacagatctcctactccatccagtcctgaggagccttaggatgcagcatgccttcaggagacactgctggacctcagcattcccttgatatcagtccccttcactgcagagccttgcctttcccctctgcctgtttccttttcctctcccaaccctctggttggtgattcaacttgggctccaagacttgggtaagctctgggccttcacagaatgatggcaccttcctaaaccctcatgggtggtgtctgagaggcgtgaagggcctggagccactctgctagaagagaccaataaagggcaggtgtggaaaaaaaaaa

SEQ ID NO: 280 - DNA, 1500 bp, Homo sapiens
  misc_feature: Incyte ID No: 296696.7
cttctgggttctcctcgtctctatgctgttctcaagagccagatacctcaactcctcaaccacactttgaaatagagttgccagatgaagcaaacacccttgaaaatcccaatgtacagacatttctgtctgcctaaacagctaatttattgagaactttgaggcaacttgcttaattacttgctttgtttttttcgtgtctgccacctggggtgcccacttcagtctccaaggcatcatcgtgacctgggctgggcagccactggtctaagggtgtccttctgtttctatcacagttatggctacaatgacattgtcaccatcccagctggtgccactaatattgacgtgaagcagcggagccacccgggtgtgcagaacgatgggaactacctggcgctgaagacggctgatgggcagtacctgctcaacggcaacctggccatctctgccatagagcaggacatcttggtgaaggggaccatcctgaagtacagcggctccatcgccaccctggagcgcctgcagagcttccggcccttgccagagcctctgacagtgcagctcctgacagtccctggcgaggtcttccccccaaaagtcaaatacaccttctttgttcctaatgacgtggactttagcatgcagagcagcaaagagagagcaaccaccaacatcatccagccgctgctccacgcacagtgggtgctgggggactggtctgagtgctctagcacctgcggggccggctggcagaggcgaactgtagagtgcagggacccctccggccaggcctctgccacctgcaacaaggctctgaaacccgaggatgccaagccctgcgaaagccagctgtgccccctgtgattcaggggggcaggggccagtcttgtgctcctggacatgcggtactgaggtgcagacaagggtctccactgtggtgactgggtcccttggccatatcaaggcagcacggcccacccaggcctcccattgccgcaacccctccagtactgcacaaattcctaagggggaagaggagagggtatggggcggcagaccctatcatcaactgtccagtggactggaccttgctcgggttcaagtagagggcataggttaaaaggtaaaagtgcacttattgactcagacaggacactcagcgtcagtctgtttgcaaaggactagcaaacttaaatgaaaaaaaaaattctatctggtttccccgataaataatctacctcacaggggaaaaaattagtacaagagaggcgtggggcagggagtcaatggtgaatgtcaaagcaggctccaaagctggaccccaagctgtcttcaagaatgaccacgactgtcttcagtgttaaaatccatcacctaaagggccgcagcgtcgcagggtttggagagccacatgttctcaggctgccacctgcaggggtggatccatttcaagtatttatgcaaatgtgtctctgaactaaagtgtgatcttatgcc

SEQ ID NO: 281 - DNA, 546 bp, Homo sapiens
  misc_feature: Incyte ID No: 410320.1
gggacaacaaaattgggaagcggttctcgaaacatactgtcaaggcgtagttgcagtgagttgtgaagaaatgttgatcccagagaaaagtttgcattttgcccacctcaaagatattttgattgtgagaacttggttacattagtctttcgtggctatatcaatatcattatttcgtgtgctgtgtggtaatgaaagctattagaaaaatcatttgtatcttaatgatttagtttgcataaaaacacgcatatagagttaagagtactttgtgtttttccactttgaagtataatatgtggataagttattagaacatttgtccgtgcctctccccaaacaatgcgcaaacggaagtgcactctaacaactaagattttaaaacacaatggtcaaatgttgagcaatgttttattgactactctgaatttatcaagtggtagataaaggacattacaatgccctagaagtgctcacggatatcaagtaaagcatgttaaattcaagtacagaaaatgccatattcttactactgagataaaaatg

SEQ ID NO: 282 - DNA, 1261 bp, Homo sapiens
  misc_feature: Incyte ID No: 426109.1
gccgggcaccggggcggcgggttggtctacgctgtgcgcggcggacgtcggaggcagcggggagcggagcggggccgccggggcctctccagggccgcagcggcagcagttgggccccccgccccggccggcggaccgaagaacgcaggaagggggccggggggacccgcccccggccggccgcagccatgaactccaacgtggagaacctacccccgcacatcatccgcctggtgtacaaggaggtgacgacactgaccgcagacccacccgatggcatcaaggtctttcccaacgaggaggacctcaccgacctccaggtcaccatcgagggccctgaggggaccccatatgctggaggtctgttccgcatgaaactcctgctggggaaggacttccctgcctccccacccaagggctacttcctgaccaagatcttccacccgaacgtgggcgccaatggcgagatctgcgtcaacgtgctcaagagggactggacggctgagctgggcatccgacacgtactgctgaccatcaagtgcctgctgatccaccctaaccccgagtctgcactcaacgaggaggcgggccgcctgctcttggagaactacgaggagtatgcagctcgggcccgtctgctcacagagatccacgggggcgccggcgggcccagcggcagggccgaagccggtcgggccctggccagtggcactgaagcttcctccaccgaccctggggccccagggggcccgggaggggctgagggtcccatggccaagaagcatgctggcgagcgcgataagaagctggcggccaagaaaaagacggacaagaagcgggcgctgcgggcgctgcggcggctgtagtgggctctcttcctccttccaccgtgaccccaacctctcctgtcccctccctccaactctgtctctaagttatttaaattatggctggggtcggggagggtacagggggcactgggacctggatttgtttttctaaataaagttggaaaagcagcttctgtgtctcacagatgccccaggaccgctgcatggtgccatgtggctctgggagtttggctcccctgcacaggccctgggtccttgtaaagcctcatggactgcagcagtgggtccatctagctcaccagccttgctgtttgaggtttgggtccacctctttgtctgtgggggtagagcggtcacaacccctctttggagtcagatttccaatctaaaatggggcgaggacctggagc

SEQ ID NO: 283 - DNA, 811 bp, Homo sapiens
  misc_feature: Incyte ID No: 1098589.27
ggaagcgtgggcgagcggtgttctgcaaaatggggctctccggcagcggatctgcgcagaagcgttccgtgcgtgcaagtgctgcgaaccacgtgggtcccgggcgcgtttcgggtgctggcggctgcagccggagttcaaacctaagcagctggaaggaaccatggccaactgtgagcgtaccttcattgcgatcaaaccagatggggtccagcggggtcttgtgggagagattatcaagcgttttgagcagaaaggattccgccttgttggtctgaaattcatgcaagcttccgaagatcttctcaaggaacactacgttgacctgaaggaccgtccattctttgccggcctggtgaaatacatgcactcagggccggtagttgccatggtctgggaggggctgaatgtggtgaagacgggccgagtcatgctcggggagaccaaccctgcagactccaagcctgggaccatccgtggagacttctgcatacaagttggcaggaacattatacatggcagtgattctgtggagagtgcagagaaggagatcggcttgtggtttcaccctgaggaactggtagattacacgagctgtgctcagaactggatctatgaatgacaggagggcagaccacattgcttttcacatccatttcccctccttcccatgggcagaggaccaggctgtaggaaatctagttatttacaggaacttcatcataatttggagggaagctcttggagctgtgagttctccctgtacagtgttaccatccccgaccatctgattaaaatgcttcctcccagc

SEQ ID NO: 284 - DNA, 966 bp, Homo sapiens
  misc_feature: Incyte ID No: 233575.1
gcaattgctctatcacttcttccctctcaagtcccgccctttcagctacctccaactgctgaggaaccggttgcctaaaaggagccggcaaaagcgcctacgtggagtccagaggagcggaagtagtcagatttgactgagagccgtaaagcgcggctggctctcgttttccggataacgactacagctccgactgtcagtgccggccttcctcgtgtgaggggatctgccggacccctgcaaattcaatttctttcccattccgggcccttccctatcgtcgcccccttcaccttggatcatgttcaagaaatttgatgaaaaagaaaatgtgtccaactgcatccagttgaaaacttcagttattaagggtattaagaatcaattgatagagcaatttccaggtattgaaccatggcttaatcaaatcatgcctaagaaagatcctgtcaaaatagtccgatgccatgaacatatagaaatccttacagtaaatggagaattactcttttttagacaaagagaagggcctttttatccaaccctaagattacttcacaaatatccttttatcctgccacaccagcaggttgataaaggagccatcaaatttgtactcagtggagcaaatatcatgtgtccaggcttaacttctcctggagctaagctttaccctgctgcagtagataccattgttgctatcatggcagaaggaaaacagcatgctctatgtgttggagtcatgaagatgtctgcagaagacattgagaaagtcaacaaaggaattggcattgaaaatatccattatttaaatgatgggctgtggcatatgaagacatataaatgagcctcagaaggaatgcacttgggctaaatatggatattgtgctgtatctgtgtttgtgtctgtgtgtgacagcatgaagataatgcctgtggttatgctgaataaattcaccagatgct

SEQ ID NO: 285 - DNA, 833 bp, Homo sapiens
  misc_feature: Incyte ID No: 235191.4
gcccccagagggttacaattcaaacgcgggcgggcgggcccgcagtcctgcagttgcagtcgtgttctccgagttcctgtctctctgccaacgccgcccggatggcttcccaaaaccgcgacccagccgccactagcgtcgccgccgcccgtaaaggagctgagccgagcgggggcgccgcccggggtccggtgggcaaaaggctacagcaggagctgatgaccctcatgatgtctggcgataaagggatttctgccttccctgaatcagacaaccttttcaaatgggtagggaccatccatggagcagctggaacagtatatgaagacctgaggtataagctctcgctagagttccccagtggctacccttacaatgcgcccacagtgaagttcctcacgccctgctatcaccccaacgtggacacccagggtaacatatgcctggacatcctgaaggaaaagtggtctgccctgtatgatgtcaggaccattctgctctccatccagagccttctaggagaacccaacattgatagtcccttgaacacacatgctgccgagctctggaaaaaccccacagcttttaagaagtacctgcaagaaacctactcaaagcaggtcaccagccaggagccctgacccaggctgcccagcctgtccttgtgtcgtctttttaatttttccttagatggtctgtcctttttgtgatttctgtataggactctttatcttgagctgtggtatttttgttttgtttttgtcttttaaattaagcctcggttgagcccttgtatattaaataaatgcatttttgtccttttttagacaaaa

SEQ ID NO: 286 - DNA, 1418 bp, Homo sapiens
  misc_feature: Incyte ID No: 468221.19
ggtggactggaaggggcggaggtaaccagaagcggctagtggcggctgcctgcgtccccaaccccctccgcgcagcgctcgcgacacgcgtgccaggagtgggagcgagcggcggggccagctgcgttctgagcctgggcgcagctggccatctgctctgggaagcaccagggtgtccccgccgccctcagctcgaagtcagccaccatggaggcgcaggcacaaggtttgttggagactgaaccgttgcaaggaacagacgaagatgcagtagccagtgctgacttctctagcatgctctctgaggaggaaaaggaagagttaaaagcagagttagttcagctagaagacgaaattacaacactacgacaagttttgtcagcgaaagaaaggcatctagttgagataaaacaaaaactcggcatgaacctgatgaatgaattaaaacagaacttcagcaaaagctggcatgacatgcagactaccactgcctacaagaaaacacatgaaaccctgagtcacgcagggcaaaaggcaactgcagctttcagcaacgttggaacggccatcagcaagaagttcggagacatgagttactccattcgccattccataagtatgcctgctatgaggaattctcctactttcaaatcatttgaggagagggttgagacaactgtcacaagcctcaagacgaaagtaggcggtacgaaccctaatggaggcagttttgaggaggtcctcagctccacggcccatgccagtgcccagagcttggcaggaggctcccggcggaccaaggaggaggagctgcagtgctaagtccagccagcgtgcagctgcatccagaaaccggccactacccagcccatctctgcctgtgcttatccagataagaagaccaaaatcccgctgggaaaaacccaggccttgacattgttattcaaatggcccctccagaaagtttaatgatttccatttgtatttgtgttgatgatggaccacttgaccatcacatttcagtattcatagatgactgtcacattttaaaatgttcccacttgagcaggtacacaactggtcataattcctgtctgtgtaattcgatgtatatttttccaaacatgtagctattgtttgctttgatttttgcttggcctcctttatgatgtgcatgtccttgaaggctgaatgaacagtccctttcagttcagcagatcaacaggatggagctcttcatgactgtctccagcaataggatgatttactataaatttcatccaactacttgtgatctctctcacctacatcaattatgtatgttaatttcagcaattaaaagaattgattttaatgactttgaattcttaatttctttgtcttaaaagttgctagttatgattttacagatgcaattt

SEQ ID NO: 287 - DNA, 6736 bp, Homo sapiens
  misc_feature: Incyte ID No: 986342.1
  unsure 1023, 3722-4040: a, t, c, g, or other
gcggcgataagaggtggcgtcctccgcggcattgcgagcaccgccagtctgcgccgctaggcgtaggcggggtggcccttgcgtctcccgcttccttgaaaaacccggcgggcgagcgaggctgcgggccggccgctgcccttccccacactccccgccgagaagcctcgctcggcgcccaacatggcgggtgggcgctgcggcccgcagctaacggcgctcctggccgcctggatcgcggctgtggcggcgacggcaggccccgaggaggccgcgctgccgccggagcagagccgggtccagcccatgaccgcctccaactggacgctggtgatggagggcgagtggatgctgaaattttacgccccatggtgtccatcctgccagcagactgattcagaatgggaggcttttgcaaagaatggtgaaatacttcagatcagtgtggggaaggtagatgtcattcaagaaccaggtttgagtggccgcttctttgtcaccactctcccagcattttttcatgcaaaggatgggatattccgccgttatcgtggcccaggaatcttcgaagacctgcagaattatatcttagagaagaaatggcaatcagtcgagcctctgactggctggaaatccccggcttctctaacgatgtctggaatggctggtctttttagcatctctggcaagatatggcatcttcacaactatttcacagtgactcttggaattcctgcttggtgttcttatgtctttttcgtcatagccaccttggtttttggcctttttatgggtctggtcttggtggtaatatcagaatgtttctatgtgccacttccaaggcatttatctgagcgttctgagcagaatcggagatcagaggaggctcatagagctgaacagttgcaggatgcggaggaggaaaaagatgattcaaatgaagaagaaaacaaagacagccttgtagatgatgaagaagagaaagaagatcttggcgatgaggatgaagcagaggaagaagangaggaggacaacttggctgctggtgtggatgaggagagaagtgaggccaatgatcaggggcccccaggagaggacggtgtgacccgggaggaagtagagcctgaggaggctgaagaaggcatctctgagcaaccctgcccagctgacacagaggtggtggaagactccttgaggcagcgtaaaagtcagcatgctgacaagggactgtagatttaatgatgcgttttcaagaatacacaccaaaacaatatgtcagcttccctttggcctgcagtttgtaccaaatccttaatttttcctgaatgagcaagcttctcttaaaagatgctctctagtcatttggtctcatggcagtaagcctcatgtatactaaggagagtcttccaggtgtgacaatcaggatatagaaaaacaaacgtagtgttgggatctgtttggagactgggatgggaacaagttcatttacttaggggtcagagagtctcgaccagaggaggccattcccagtcctaatcagcaccttccagagacaaggctgcaggccctgtgaaatgaaagccaagcaggagccttggctcctgagcatccccaaagtgtaacgtagaagccttgcatccttttcttgtgtaaagtatttatttttgtcaaattgcaggaaacatcaggcaccacagtgcatgaaaaatctttcacagctagaaattgaaagggccttgggtatagagagcagctcagaagtcatcccagccctctgaatctcctgtgctatgttttatttcttacctttaatttttccagcatttccaccatgggcattcaggctctccacactcttcactattatctcttggtcagaggactccaataacagccaggtttacatgaactgtgtttgttcattctgacctaaggggtttagataatcagtaaccataacccctgaagctgtgactgccaaacatctcaaatgaaatgttgtggccatcagagactcaaaaggaagtaaggattttacaagacagattaaaaaaaaattgttttgtccaaaatatagttgttgttgatttttttttaagttttctaagcaatatttttcaagccagaagtcctctaagtcttgccagtacaaggtagtcttgtgaagaaaagttgaatactgttttgttttcatctcaaggggttccctgggtcttgaactactttaataataactaaaaaaccacttctgattttccttcagtgatgtgcttttggtgaaagaattaatgaactccagtacctgaaagtgaaagatttgattttgtttccatcttctgtaatcttccaaagaattatatctttgtaaatctctcaatactcaatctactgtaagtacccagggaggctaatttccttaaaaaaaaaaaatctatccatctacttctctcttacctgatttatgtgttagaataaattcatgaaattcgattccaagcatacgaaagatgcctaaagttgattctatgctccttagatccagacagaataatgagtacaggtttatgaaattctaaaagtttctgtcgtctttaaaaaggaacgtgcagtatatttctatctggctgtttagataaccctttccttgtattaattgtgagcacggagctcactggtgggggaggttctgaaactctctgccctcctgtggttgaatgaagatgttgcaagacttgcacaaaggaggttattcttctgacagcatcaacttttagagatggttctttttcatctttccaattcagttacttgacagtctccttccccagtatgctgaagttggttaagagtcaccagtaattgtgcttttcagacagtagtgcagcttcaaaatcgaggccatcactgggctgatgggctgggagaaccttgccatgtgcctgcctgtttcctgcccccttagtcactgcccatttcctgcccccttggtcgctgacacaccttcacccaaagtgccatggttctgatggtggcagttccatctccctgacatcaggaagcttttctcgatcagagcagagcggggcctgcctgccctcgtgtcactggatttctttctcttataatcagctgaaacagagttctcaaagaacagtaaactcaggttcagaggtattatggaataagaatggtttcatagtttggcttttctatataattcctccctctcaaactgaaatattcatttttttagtggagtatttgactagagagaaggtaaggcagaaatacagtctacactggcttttaaaaatgtaaagccaatttccaaccggaccccaaatagtacaggttgaacattccgttccaacaatccaaaaccccaaatgctccaaaatcttaaactttgagttccagcattccgtcagaagtggaaaattttacacctgacctcatttgacaggtggcagttacagtgcaatcaaaactttgttccatgcccaagattattaaaaatattggataaaattaccttcaagctatgttgtataaggtgtatataaaacaaatgaattttgtgtttagacttgggtctactcccaagatacctcattatatatatacaaaaatccccaaatccaaaaacatttgaaacacttctggtcccacacattttggataagggatatttgacctatatctaattatataataagaaaaannnnnnnnnnnnnnnnnnnnnnnnnnnnnnnnnnnnnnnnnnnnnnnnnnnnnnnnnnnnnnnnnnnnnnnnnnnnnnnnnnnnnnnnnnnnnnnnnnnnnnnnnnnnnnnnnnnnnnnnnnnnnnnnnnnnnnnnnnnnnnnnnnnnnnnnnnnnnnnnnnnnnnnnnnnnnnnnnnnnnnnnnnnnnnnnnnnnnnnnnnnnnnnnnnnnnnnnnnnnnnnnnnnnnnnnnnnnnnnnnnnnnnnnnnnnnnnnnnnnnnnnnnnnnnnnnnnnnnnnnnnnnnnnnnnnnnnnnnnnnnnnnnnnnnnnnnnnnnnctttctcagaaatacttttaaaaaaaattgaagggtgaggagaaaaacatcttggagaagaggacccattaaaactttaaatatctgtgggaaccatttttcctgattttcccttttttaacatcatggcaaagatgggtttttttccaacaaaatttaatttaatatctttccacttgaagattttaggtttgttttcaatacttaatgaatataaaactaaaggagaaaagccaacctgaaataatttaaactttatatgaacatttcgataagagtttgtggattttttctgtagataatatatttgatccggaactcaagtgcatggaaacatgattttgatttttaaaatctaaaaaaaaaaaaattaaaatcatgcttccctctattgcagtatcagttatttagtcacagaatggtattttatgtaaattaaaattaggtgaatgcaatgcaggtaactggttttggaatgggaatgtgcagtgctttatgtttggggagttggagcagggtatcttttcatcaattagaaggaaagtttgaaacttctgattacctttatgttggtttctcttattatttgtctcttgctagatctgctaaaccaacccagcttgctcagagatctcatattgaagcaacatacaggcaatccacatctttctttccctttgaagtatagtcattggatgggatgagggacagggcctgttgggttcacagggccttgcactgcatgggcacatacttaaaagctcttgtgcatggaatccctgtctgttagccacaggcctctttagctctatacattcaaaataactactgtagtagaaaatagataagcttcagctgagttggcttttgatagtggaaaaaaaacaaaatttgactttttatggccaaaattccttgttgacagctgtgatgttctaatatgatttgggaatatgtcagtctacagaacctgcatcctgtaaaaacacctttggggtagacgataaaagtcatttttaaggcaaatacttaccatgtgactttttattaccaaatgcatcagtagtggagctggtatgttgtttcataggatggaaacattagaagtccagagaaaaataaattttaaaaaaaggtggaaaagttacggcaaacctgagatttcagcataaaatctttagtatgaagtgagagaaagaagagggaggctggttctgttgctcgtatcaataggttatctgtgtccctcatcttggtgttacagtgttatttctgtcagtattatgaatatgtggttgacccatcctgtcaaatgtaccaacattttcgaaagaattcattcaaatctcttatgccaacagaaaagttccttcttgtttaatatctctttacctcagtcctacattttgattctctggaggagattttagcttgtcttaaaaagccaaatttggagtcatcaagcctgctgaacctgatggggcagctttttgaacagctttctggaagtaagaacttcagttgaaaagccctttgatcgcttcagcccgggacatgcccttcagatggcttattctcagtaaagctttatgtagactgtgacactgtatatgtgtgactcgtacaactttgacgtgtttctgaagtggtttaatcgtatttgttattagcttctttgtggaaatgcaatttttatactaaaaacattgcttatttgcaatgcaatatgttataaatttgttgtttatattactggtattagtcttagcctaatgaacctaattatttttctttctgtattctttgcttcctcaaatagcatctgcagcaattggaatgagaaatccagatatgtgtttcaagtagtacattgcctgaatcacaaatcacttgatcacagtattgtatataatccctgatcctatttgtttcattttattgtaaattcccatttgcatcaaaacctaatgatagtgattggtaagtaaaaacaaatggtgtattgcttttcatacaagtgttttcacaaaagccatttgcctaggcagcaaaaaatattaatttgttaaaaaaaattttccttcgtgtccatcctccatctagtctgttcattcattctctctctttctcccttcctgactcggtgaaactcagaccatgtgccctttagttgctctggaaaggtgcacaaaaccaaggcagggtccaaagatccaaggctcttccagccagtgtgttgccatcagaaacctctggggtctccctctgtcctgaggtcttggggtagccagatggcaagggatgctactaatcccccaagacactatggattggtcttgtctttggggctttcagaaaactcccttctacacctaactctccccaccactatagtggaaaagcatcaaggtggtaaggtgggtccttgaaacaccctcagagactgaaacaatggagattggatttttgtctttggaagatggagggggatgtgtgtagtgagaagacagttactaaacctgcataccaccaaggccctccctcagagatactggctcagaatgcttatttgcctatacagagaaacaatgtctgtcgtgctgtctgcctagatgactttggttattcatccttgcctatagcaaaatgcagctttcaagccaacaacactgaattacaaatttaaccccctgcaa

SEQ ID NO: 288 - DNA, 2784 bp, Homo sapiens
  misc_feature: Incyte ID No: 240120.3
  unsure 1681: a, t, c, g, or other
ccaaaaggtgggcttctgaaacttggagggtgacagggatggagacccctggtatggggcttagatgaagcaagaggccaggcccggaacagaactaagctcagcagtcagtcacaaggctgcagagtgacaggcgtttggggaaaggtaggaaccgctctccgccacctgccggtcagtagccctacccacaatcaggccgcggctgcctcggcctggtcccaaaaattgtgaacgccgccctctcctcccgcccagtcctccgccgcgcccgcggggtcgggggctgcgctgccggcgccgcgagccgggcgagcttcccagcacgggaggagggagggggcggcgccgggcggggcggagcttccgcgcctcctggagccttattcccggccgcgagccgggcagcgctcattcggccgaaggagctacgcgggccacgctgctggctggcctgacctaggcgcgcggggtcgggcggccgcgcgggcgggctgagtgagcaagacaagacactcaagaagagcgagctgcgcgtgggtcccggccaggcttgcacgcagaggcgggcggcagacggtgcccggcggaatctcctgagctccgccgcccagctctggtgccagcgcccagtggccgccgcttcgaaagtgactggtgcctcgccgcctcctctcggtgcgggaccatgaagctgctgccgtcggtggtgctgaagctctttctggctgcagttctctcggcactggtgactggcgagagcctggagcggcttcggagagggctagctgctggaaccagcaacccggaccctcccactgtatccacggaccagctgctacccctaggaggcggccgggaccggaaagtccgtgacttgcaagaggcagatctggaccttttgagagtcactttatcctccaagccacaagcactggccacaccaaacaaggaggagcacgggaaaagaaagaagaaaggcaaggggctagggaagaagagggacccatgtcttcggaaatacaaggacttctgcatccatggagaatgcaaatatgtgaaggagctccgggctccctcctgcatctgccacccgggttaccatggagagaggtgtcatgggctgagcctcccagtggaaaatcgcttatatacctatgaccacacaaccatcctggccgtggtggctgtggtgctgtcatctgtctgtctgctggtcatcgtggggcttctcatgtttaggtaccataggagaggaggttatgatgtggaaaatgaagagaaagtgaagttgggcatgactaattcccactgagagagacttgtgctcaaggaatcggctggggactgctacctctgagaagacacaaggtgatttcagactgcagaggggaaagacttccatctagtcacaaagactccttcgtccccagttgccgtctaggattgggcctcccataattgctttgccaaaataccagagccttcaagtgccaaacagagtatgtccgatggtatctgggtaagaagaaagcaaaagcaagggaccttcatgcccttctgattcccctccaccaaaccccacttcccctcataagtttgtttaaacacttatcttctggattagaatgccggttaaattccatatgctccaggatctttgactgaaaaaaaaaaagangaagaagaaggagagcaagaaggaaagatttgtgaactggaagaaagcaacaaagattgagaagccatgtactcaagtaccaccaagggatctgccattgggaccctccagtgctggatttgatgagttaactgtgaaataccacaagcctgagaactgaattttgggacttctacccagatggaaaaataacaactatttttgttgttgttgtttgtaaatgcctcttaaattatatatttattttattctatgtatgttaatttatttagtttttaacaatctaacaataatatttcaagtgcctagactgttactttggcaatttcctggccctccactcctcatccccacaatctggcttagtgccacccacctttgccacaaagctaggatggttctgtgacccatctgtagtaatttattgtctgtctacatttctgcagatcttccgtggtcagagtgccactgcgggagctctgtatggtcaggatgtaggggttaacttggtcagagccactctatgagttggacttcagtcttgcctaggcgattttgtctaccatttgtgttttgaaagcccaaggtgctgatgtcaaagtgtaacagatatcagtgtctccccgtgtcctctccctgccaagtctcagaagaggttgggcttccatgcctgtagctttcctggtccctcacccccatggccccaggcccacagcgtgggaactcactttcccttgtgtcaagacatttctctaactcctgccattcttctggtgctactccatgcaggggtcagtgcagcagaggacagtctggagaaggtattagcaaagcaaaaggctgagaaggaacagggaacattggagctgactgttcttggtaactgattacctgccaattgctaccgagaaggttggaggtggggaaggctttgtataatcccacccacctcaccaaaacgatgaaggtatgctgtcatggtcctttctggaagtttctggtgccatttctgaactgttacaacttgtatttccaaacctggttcatatttatactttgcaatccaaataaagataacccttattccataaaaaaaaaaaagg

SEQ ID NO: 289 - DNA, 2355 bp, Homo sapiens
  misc_feature: Incyte ID No: 5511889CB1
cgccctttttttttttccccagggagtgggggctggcccttactgctttataagcaccagctcaagaaggaacctacagcctcttggaaaggaatctcactaggggcttgactgcgtgggtctgtagcgctttcactgtaagaaagcaagatgcattttagaaactttaactacagttttagctccctgattgcctgtgtggcaaacagtgatatcttcagcgaaagtgaaaccagggccaaatttgagtccctctttaggacgtatgacaaggacatcacctttcagtattttaagagcttcaaacgagtcagaataaacttcagcaaccccttctccgcagcagatgccaggctccagctgcataagactgagtttctgggaaaggaaatgaagttatattttgctcagaccttacacataggaagctcacacctggctccgccaaatccagacaagcagtttctgatctcccctcccgcctctccgccagtgggatggaaacaagtggaagatgcgaccccagtcataaactatgatctcttatatgccatctccaagctggggccaggggaaaagtatgaattgcacgcagcgactgacaccactcccagcgtggtggtccatgtatgtgagagtgatcaagagaaggaggaagaagaggaaatggaaagaatgaggagacctaagccaaaaattatccagaccaggaggccggagtacacgccgatccacctcagctgaactggcacgcgacgaggacgcattccaaatcatactcacgggaggaatcttttactgtggaggtggctggtcacgacttcttcggaggtggcagccgagatcggggtggcagaaatcccagttcatgttgctcagaagagaatcaaggccgtgtccccttgttctaatgctgcacaccagttactgttcatggcacccgggaatgacttgggccaatcactgagtttgtggtgatcgcacaaggacatttgggactgtcttgagaaaacagataatgatagtgttttgtacttgttcttttctggtaggttctgtctgtgccaagggcaggttgatcagtgagctcaggagagagcttcctgtttctaagtggcctgcaggggccactctctactggtaggaagaggtaccacaggaagccgcctagtgcagagaggttgtgaaaacagcagcaatgcaatgtggaaattgtagcgtttcctttcttccctcatgttctcatgtttgtgcatgtatattactgatttacaagactaacctttgttcgtatataaagttacaccgttgttgttttacatcttttgggaagccaggaaagcgtttggaaaacgtatcacctttcccagattctcggattctcgactctttgcaacagcacttgcttgcggaactcttcctggaatgcattcactcagcatccccaaccgtgcaacgtgtaacttgtgcttttgcaaaagaagttgatctgaaattcctctgtagaatttagcttatacaattcagagaatagcagtttcactgccaacttttagtgggtgagaaattttagtttaggtgtttgggatcggacctcagtttctgttgtttcttttatgtggtggtttctatacatgaatcatagccaaaaacttttttggaaactgttggttgagatagttggttcttttaccccacgaagacatcaagatacacttgtaaataaagctgatagcatatattcatacctgttgtacacttgggtgaaaagtatggcagtgggagactaagatgtattaacctacctgtgaatcatatgttgtaggaaaagctgttcccatgtctaacaggacttgaattcaaagcatgtcaagtggatagtagatctgtggcgatatgagagggatgcagtgcctttccccattcattcctgatggaattgttatactaggttaacatttgtaatttttttctagttgtaatgtgtatgtctggtaaataggtattatattttggccttacaataccgtaacaatgtttgtcattttgaaatacttaatgccaagtaacaatgcatgctttggaaatttggaagatggttttattctttgagaagcaaatatgtttgcattaaatgctttgattgttcatatcaagaaattgattgaacgttctcaaaccctgtttacggtacttggtaagagggagccggtttgggagagaccattgcatcgctgtccaagtgtttcttgttaagtgcttttaaactggagaggctaacctcaaaatattttttttaactgcattctataataaatgggcacagtatgctccttacagaaaaaaaaaaaaaaa

SEQ ID NO: 290 - DNA, 1295 bp, Homo sapiens
  misc_feature: Incyte ID No: 3009578CB1
gactggtggagctgccgcgctgtccgcgttatctcctcccggtgagaaggaaccgcagtgtccaccggcgaggagccagccctgtcccggtcagagaaagacgacgaggatacctgggagcgggcggcggccgggctgggccgcgccggtgcgggctggcgactctgctcctccgcttgctgctgtctctgggaactgggtgccagcgctgaggggcttccagcggacagggacccccttccccggctcccctgcccaccctgccggggagggcggaagatgccggtgaagaagaagagaaaatcccctggggtggcagcagcagtagcggaagacggaggcctcaaaaagtgtaaaatctccagctattgcagatcccaaccccctgctagactaataagtggagaggaacatttttcaagcaagaagtgcctggcttggttttatgaatatgcaggtcctgatgaagttgtagggccagaaggaatggaaaaattttgtgaagacattggtgttgaacctgaaaatattattatgttagttttagcgtggaaattggaggctgaaagcatgggattttttaccaaggaagaatggttaaagggaatgacttcattacagtgtgactgcacagaaaagttacaaaacaaatttgactttttgcgctcacagttgaatgatatttcgtcatttaagaatatctacagatatgcctttgattttgcaagggataaagatcagagaagccttgatattgatactgctaaatctatgttagctcttctgcttgggaggacatggccactgttttcagtattttaccagtacctggagcaatcaaagtatcgtgttatgaacaaagatcaatggtacaatgtattagaattcagcagaacagtccatgctgatcttagtaactatgatgaagatggtgcttggcctgttcttcttgatgaatttgttgagtggcaaaaagtccgtcagacatcatagcaagaactatgtgaagaaaatgcaaacctttcaattcccacgtgtatacaagctaatgtgatgagggggaaaaaaatccaacgggtgcattttcattcatatgaaagacttctcatagtacttttttttcctttttttaaaggaggtttttcttgttacatgtgatgggcattgagccacacctcttcttagactgaatattgaagtttttgttttgagttatgtttataacatttatttcagaacaataaagattcagatttgtgacaaaggccttaaagtgaagatgtccaaaaaaaaaa

SEQ ID NO: 291 - DNA, 3163 bp, Homo sapiens
  misc_feature: Incyte ID No: 982520.1
  unsure 806: a, t, c, g, or other
tcggaattcggctcgaggctcatctgggcagaggaagcttcagaaagctgccaaggcaccatctccaggaactcccagcacgcagaatccatctgagaatatgctgccacaaataccctttttgctgctagtatccttgaacttggttcatggagtgttttacgctgaacgataccaaatgcccacaggcataaaaggcccactacccaacaccaagacacagttcttcattccctacaccataaagagtaaaggtatagcagtaagaggagagcaaggtactcctggtccaccaggccctgctggacctcgagggcacccaggtccttctggaccaccaggaaaaccaggctacggaagtcctggactccaaggagagccagggttgccaggaccaccgggaccatcagctgtagggaaaccaggtgtgccaggactcccaggaaaaccaggagagagaggaccatatggaccaaaaggagatgttggaccagctggcctaccaggaccccggggcccaccaggaccacctggaatccctggaccggctggaatttctgtgccaggaaaacctggacaacagggacccacaggagccccaggacccaggggctttcctggagaaaagggtgcaccaggagtccctggtatgaatggacagaaaggggaaatgggatatggtgctcctggtcgtccaggtgagaggggtcttccaggccctcagggtcccacaggaccatctggccctcctggagtgggaaaaagaggtgaaaatggggttccaggacagccaggcatcaaaggtngatagaggttttccgggagaaatgggaccaattggcccaccaggtccccaaggccctcctggggaacgagggccagaaggcattggaaagccaggagctgctggagccccaggccagccagggattccaggaacaaaaggtctccctggggctccaggaatggctgggcccccagggcctcctggctttgggaaaccaggcttgccaggcctgaagggagaaagaggacctgctggccttcctgggggtccaggtgccaaaggggaacaagggccagcaggtcttcctgggaagccaggtctgactggaccccctgggaatatgggaccccaaggaccaaaaggcatcccgggtagccatggtctcccaggccctaaaggtgagacagggccagctgggcctgcaggataccctggggctaagggtgaaaggggttcccctgggtcagatggaaaaccagggtacccaggaaaaccaggtctcgatggtcctaagggtaacccagggttaccaggtccaaaaggtgatcctggagttggaggacctcctggtctcccaggccctgtgggcccagcaggagcaaagggaatgcccggacacaatggagaggctggcccaagaggtgcccctggaataccaggtactagaggccctattgggccaccaggcattccaggattccctgggtctaaaggggatccaggaagtcccggtcctcctggcccagctggcatagcaactaagggcctcaatggacccaccgggccaccagggcctccaggtccaagaggccactctggagagcctggtcttccagggccccctgggcctccaggcccaccaggtcaagcagtcatgcctgagggttttataaaggcaggccaaaggcccagtctttctgggacccctcttgttagtgccaaccagggggtaacaggaatgcctgtgtctgcttttactgttattctctccaaagcttacccagcaataggaactcccataccatttgataaaattttgtataacaggcaacagcattatgacccaaggactggaatctttacttgtcagataccaggaatatactatttttcataccacgtgcatgtgaaagggactcatgtttgggtaggcctgtataagaatggcacccctgtaatgtacacctatgatgaatacaccaaaggctacctggatcaggcttcagggagtgccatcatcgatctcacagaaaatgaccaggtgtggctccagcttcccaatgccgagtcaaatggcctatactcctctgagtatgtccactcctctttctcaggattcctagtggctccaatgtgagtacaccccacagagctaatctaaatcttgtgctagaaaaagcattctctaactctaccccaccctacaaaatgcatatggaggtaggctgaaaagaatgtaatttttattttctgaaatacagatttgagctatcagaccaacaaaccttccccctgaaaagtgagcagcaacgtaaaaacgtatgtgaagcctctcttgaatttctagttagcaatcttaaggctctttaaggttttctccaatattaaaaaatatcaccaaagaagtcctgctatgttaaaaacaaacaacaaaaaacaaacaacaaaaaaaaaattaaaaaaaaaaacagaaatagagctctaagttatgtgaaatttgatttgagaaactcggcatttcctttttaaaaaagcctgtttctaactatgaatatgagaacttctaggaaacatccaggaggtatcatataactttgtagaacttaaatacttgaatattcaaatttaaaagacactgtatcccctaaaatatttctgatggtgcactactctgaggcctgtatggcccctttcatcaatatctattcaaatatacaggtgcatatatacttgttaaagctcttatataaaaaagccccaaaatattgaagttcatctgaaatgcaaggtgctttcatcaatgaaccttttcaaacttttctatgattgcagagaagctttttatatacccagcataacttggaaacaggtatctgacctattcttatttagttaacacaagtgtgattaatttgatttctttaattccttattgaatcttatgtgatatgattttctggatttacagaacattagcacatgtaccttgtgcctcccattcaagtgaagttataatttacactgagggtttcaaaattcgactagaagtggagatatattatttatttatgcactgtactgtatttttatattgctgtttaaaacttttaagctgtgcctcacttattaaagcacaaaatgttttacctactcctt

SEQ ID NO: 292 - DNA, 2164 bp, Homo sapiens
  misc_feature: Incyte ID No: 899156.36
taatcacaaaaaaaggagaatccgaagggaaaggaataagatggctgcagccaaatgccgcaaccggaggagggagctgactgatacactccaagcggtaggtactctgtgggttgctcctttttaaaacttaagggaaagttggagattgagcataagggcccttgagtaagactgtgtcttatgctttcctttatccctctgtatacaggagacagaccaactagaagatgagaagtctgctttgcagaccgagattgccaacctgctgaaggagaaggaaaaactagagttcatcctggcagctcaccgacctgcctgcaagatccctgatgacctgggcttcccagaagagatgtctgtggcttcccttgatctgactgggggcctgccagaggttgccaccccggagtctgaggaggccttcaccctttcggagtccccggcccctccgctggggcttactccagggctggcgttgtgaagaccatgacaggaggccgagcgcagagcattggcaggaggggcaaggtggaacagttatctccagaagaagaagagaaaaggagaatccgaagggaaaggaataagatggctgcagccaaatgccgcaaccggaggagggagctgactgatacactccaagcggagacagaccaactagaagatgagaagtctgctttgcagaccgagattcccttgatctgactgggggcctgccagaggttgccaccccggagtctgaggaggccttcaccctgcctctcctcaatgaccctgagcccaagccctcagtggaacctgtcaagagcatcagcagcatggagctgaagaccgagccctttgatgacttcctgttcccagcatcatccaggcccagtggctctgagacagcccgctccgtgccagacatggacctatctgggtccttctatgcagctgcactgcttacacgtcttccttcgtcttcacctaccccgaggctgactccttccccagctgtgcagctgcccaccgcaagggcagcagcagcaatgagccttcctctgactcgctcagctcacccacgctgctggccctgtgagggggcagggaaggggaggcagccggcacccacaagtgccactgcccgagctggtgcattacagagaggagaaacacatcttccctagagggttcctgtagacctagggaggaccttatctgtgcgtgaaacacaccaggctgtgggcctcaaggacttgaaagcatccatgtgtggactcaagtccttacctcttccggagatgtagcaaaacgcatggagtgtgtattgttcccagtgacacttcagagagctggtagttagtagcatgttgagccaggcctgggtctgtgtctcttttctctttctccttagtcttctcatagcattaactaatctattgggttcattattggaattaacctggtgctggatattttcaaattgtatctagtgcagctgattttaacaataactactgtgttcctggcaatagtgtgttctgattagaaatgaccaatattatactaagaaaagatacgactttattttctggtagatagaaataaatagctatatccatgtactgtagtttttcttcaacatcaatgttcattgtaatgttactgatcatgcattgttgaggtggtctgaatgttctgacattaacagttttccatgaaaacgttttattgtgtttttaatttatttattaagatggattctcagatatttatatttttattttatttttttctaccttgaggtcttttgacatgtggaaagtgaatttgaatgaaaaatttaagcattgtttgcttattgttccaagacattgtcaataaaagtcttaatgttcacatccaatcaaccaccaagaaagtatggcgtggggaactagttgaatcttggtgtcattaatatagatagagacccaaggtgagatttgaggtgcagtgagagaactgaaagagaagattatatttagttcaaagtgagatatttccatgtcaaagttcaaaataagttggataaaatattatggagctcaaaagagagatatatgctggagatacagatttgggagtcaacacttatatgatagtgaaaaccgtaagatcatttgaacattgtggtagg

SEQ ID NO: 293 - DNA, 1397 bp, Homo sapiens
  misc_feature: Incyte ID No: 1748428CB1
gagcggcggcgacggcggcggcggcggcggcgcccgagcacccgagggggtccgagccccggcagccggccagccccgcgccacaaagggagcgcccccgccgcccggcaccccgcctccctccccaatgtcctcggccatcgaaaggaagagcctggacccttcagaggaaccagtggatgaggtgctgcagatccccccatccctgctgacatgcggcggctgccagcagaacattggggaccgctacttcctgaaggccatcgaccagtactggcacgaggactgcctgagctgcgacctctgtggctgccggctgggtgaggtggggcggcgcctctactacaaactgggccggaagctctgccggagagactatctcaggctttttgggcaagacggtctctgcgcatcctgtgacaagcggattcgtgcctatgagatgacaatgcgggtgaaagacaaagtgtatcacctggaatgtttcaagtgcgccgcctgtcagaagcatttctgtgtaggtgacagatacctcctcatcaactctgacatagtgtgcgaacaggacatctacgagtggactaagatcaatgggatgatataggcccgagtccccgggcatctttggggaggtgttcactgaagacgccgtctccatggcatcttcgtcttcactcttaggcactttgggggtttgagggtggggtaagggatttcttaggggatggtagacctttattgggtatcaagacatagcatccaagtggcataattcaggggctgacacttcaaggtgacagaaggaccagcccttgagggagaacttatggccacagcccatccatagtaactgacatgattagcagaagaaaggaacatttaggggcaagcaggcgctgtgctatcatgatggaatttcatatctacagatagagagttgttgtgtacagacttgttgtgactttgacgcttgcgaactagagatgtgcaattgatttcttttcttcctggctttttaactcccctgtttcaatcactgtcctccacacaagggaaggacagaaaggagagtggccattctttttttcttggcccccttcccaaggccttaagctttggacccaaggaaaactgcatggagacgcatttcggttgagaatggaaaccacaacttttaaccaaacaattatttaaagcaatgctgatgaatcactgtttttagacaccttcattttgaggggaggagttccacagattgtttctatacaaatataaatcttaaaaagttgttcaactattttattatcctagattatatcaaagtatttgtcgtgtgtagaaaaaaaaaacagctctgcaggcttaataaaaatgacagactgaaaaaaaaaaaaaaa

SEQ ID NO: 294 - DNA, 194 bp, Homo sapiens
  misc_feature: Incyte ID No: 238540.1
gcaggaaggacaggggcttggctgagcagagcatggccagcctagccgagggcagccagcatcctacactcactggtctcgaggtgcccaagccaggggcccaggactttgggcattactgggaaatgatgggaacccagggtgaggtggcgtgaaacaagatgagatgctcaatgatttgggaggttggttag

SEQ ID NO: 295 - DNA, 581 bp, Homo sapiens
  misc_feature: Incyte ID No: 898495.3
tcggctcgagctctactcttcaaaaataagtcggatccacaaagtactactcaacatattggacctcagtgtggacaggtgaatgaaggacatgtggagaattccatttccaactccatgtgcatgaattatttgccctggttgttcatctgtcatagtgtaaaaagcctgatttacaaagactggaggcctttcgcagaacaagcgttctggaagatgttaattgtgtggttcaactccatattacccatgaaagaggtcagagtcatggaaaaacatgataaataacttccagtttacggagatataggacaaggcaagaagggtggaagaaggcataagagatcctcacgtggcattatcaggataaagtttgttaatgtagctgaactagagaaacatggttataagatggagacttcatagcgtccagaagaagtgttgaagtaacctaaacttgacctgcttaatacattctaggacagagaacccaggatgggacactaaaaaaataagtttatttcattatctgcttggatttatttgtgtttttgtaacacaaaaaataaatgttttgatat

SEQ ID NO: 296 - DNA, 2883 bp, Homo sapiens
  misc_feature: Incyte ID No: 369213.48
cgcgatctagagccagagctgcctggggaatacagcatgaaagtgacaggagaaggatgtgtctacctccagacatccttgaaatacaatattctcccagaaaaggaagagttcccctttgctttaggagtgcagactctgcctcaaacttgtgatgaacccaaagcccacaccagcttccaaatctccctaagtgtcagttacacagggagccgctctgcctccaacatggcgatcgttgatgtgaagatggtctctggcttcattcccctgaagccaacagtgaaaatgcttgaaagatctaaccatgtgagccggacagaagtcagcagcaaccatgtcttgatttaccttgataaggtgtcaaatcagacactgagcttgttcttcacggttctgcaagatgtcccagtaagagatctgaaaccagccatagtgaaagtctatgattactacgagacggatgagtttgcaattgctgagtacaatgctccttgcagcaaaggtaagccactcacactcctccaaaaggcagtcagagctccttcagcttgccccccaaaccttctccttcataaaacgctgggtaaatatttgtcaaaaacatcaaattactcacactgcacattattatagaaaaacacatttattggagagggccgctgactctgtcaaacctcagagagtccataggattgcttatgggtaatgatttggaatagatttggtttcccactgtactgattaggtttccttgggcactatgctacccagaactaagggaaagaatactctctgctcatggagacccaaatctgtcttaattttttttctttccaatgtcacagatcttggaaatgcttgaagaccacaaggctgaaaagtgctttgctggagtcctgttctcagagctccacagaagacacgtgtttttgtatctttaaagacttgatgaataaacactttttctggtcaatgtctttccctgtttcctgttcattcaataaatatcattgtacatttccatatgattcccaatagaataccaagattaaacttaaaggaatcaagtgctgaaggacttcagaatacaaaaaaatgatacagtgatgtcggtctgagtaggcttcatgtaaggactgtggggaaagaagaaagtattgggttatgtactaggaaagtgtaaagtgtgtttggttatgggaataccctatgaaaaacccaaagggtgaatttttatgagaaaataaaagactgacttcaccagaaaagactttttacattaaaatgaagtagaatgaaatacaacattgaacatgtcatattgagaggcaagataattgggacttgacctgaattgggagtgatgtgtcctatgttacaccaaaatctgccactgatgagagtgatcagtcagttaacctggggtttcagattcaataatagatgagctgaaaataatgaagggaggattcatgcagaagcacgttttctcagaagaaggaatgtgtatgactcaaagtccaaataggagtattatattggatcatctttcttctggaactttgagccaggattaaaggatagctgtaaagtcaaggagatattctgatgcagaaatcagttctcacaacatctgattgatgtctgatgtctcacaacatctctttagtctatttttaaaatatataattttctttgcagtaagtattgcgacatatatttccattctatagaaggggaagcaaaacttcaggagtttttgaagtaggaaaggttaaagcaggaggattgagccaagagagtctgaggacaatcgtaggagtcctactcttcatttggcacaaaaatgacaatgcttagttaggcagaaggtgagtatggattgtataaactaagaactggaaaagactttgcagttcaaggaatccttagctctgtctccaggctagacaaaataagaaataaaagctatcacttctgtgtggtgcttatagaatagaattaacatatcagcattatgggatctttagggtgtcgctttcctggccagtctagtggcacctttgcctgagttttgctctgggcccactgggctgcttctgcccactcgcacttgctaccaacctggatcccggatccaagggagattgagacgggtggagcagaggggtgtgctaggggtgtgtgagcaagcgtggccactgtgcagtcacacacacaagctgctgcccaggttgggcagctccaggtgccagcacaggctctccatgaggtggctggaccaggcacacaacaaacagcttccccctggaccaggcgcatcacaagcagcttccaacagtggcactggcgaatgcagtgacgccaaccagggccccaaagagggagtcacagcccgggctcaaggagctcccaggtctgggcttctccgagggccagagctcttctctccctgtggggagcaaggggcatgttgcagccctgtttgtgttacagctcttttaaccttgctgtgcagctcctcagctcctgcatcaagcagacaagtggagaatgagacagatgaagaggagcattactgagcaatggaacagaaggataaggaagatgaagaggaaggagacctgcagttagtagctcatttccacagtaaggatgtcctttccacagcaagtgtgtcccaacgagtgttcagcttctagcagaaaggagaccctggagtggctggctcctctctgcaaacaggtcttcccattgagtgttcagctttcagcagagaggaggttctggaatgggtagtttctctccacaggtaggtcatccattgtcttcccatcctctcttccaatctagctgagtctgggggattttatgagcctg

SEQ ID NO: 297 - DNA, 1855 bp, Homo sapiens
  misc_feature: Incyte ID No: 3084563CB1
caaaacggcgcgcaggccgggcgcacccagccgccacttccgagagcgcctgccgcccctgcgccgccgagccagctgccagaatgccgaactggggaggaggcaagaaatgtggggtgtgtcagaagacggtttactttgccgaagaggttcagtgcgaaggcaacagcttccataaatcctgcttcctgtgcatggtctgcaagaagaatctggacagtaccactgtggccgtgcatggtgaggagatttactgcaagtcctgctacggcaagaagtatgggcccaaaggctatggctacgggcagggcgcaggcaccctcagcactgacaagggggagtcgctgggtatcaagcacgaggaagcccctggccacaggcccaccaccaaccccaatgcatccaaatttgcccagaagattggtggctccgagcgctgcccccgatgcagccaggcagtctatgctgcggagaaggtgattggtgctgggaagtcctggcataaggcctgctttcgatgtgccaagtgtggcaaaggccttgagtcaaccaccctggcagacaaggatggcgagatttactgcaaaggatgttatgctaaaaacttcgggcccaagggctttggttttgggcaaggagctggggccttggtccactctgagtgaggccaccatcacccaccacaccctgcccactcctgcgcttttcatcgccattccattcccagcagctttggagacctccaggattatttctctgtcagccctgccacatatcactaatgacttgaacttgggcatctggctccctttggtttgggggtctgcctgaggtcccacccactaaagggctccccaggcctgggatctgacaccatcaccagtaggagacctcagtgttttgggtctaggtgagagcaggcccctctccccacacctcgccccacagagctctgttcttagcctcctgtgctgcgtgtccatcatcagctgaccaagacacctgaggacacatcttggcacccagaggagcagcagcaacaggctggagggagagggaagcaagaccaagatgaggaggggggaaggctgggttttttggatctcagagattctcctctgtgggaaagaggttgagcttcctggtgtccctcagagtaagcctgaggagtcccagcttagggagtcactattggaggcagagaggcatgcaggcggggcctaggagcccctgcttctccaggcctcttgcctttgagtctttgtggaatggatagcctcccactaggactgggaggagaataacccaggtcttaaggaccccaaagtcaggatgttgtttgatcttctcaaacatctagttccctgcttgatgggaggatcctaatgaaatacctgaaacatatattggcatttatcaatggctcaaatcttcatttatctctggccttaaccctggctcctgaggctgcggccagcagagcccaggccagggctctgttcttgccacacctgcttgatcctcagatgtggagggaggtaggcactgcctcagtcttcatccaaacacctttccctttgccctgagacctcagaatcttccctttaacccaagaccctgcctcttccactccacccttctccagggacccttagatcacatcactccacccctgccaggccccaggttaggaatagtggtgggaggaaggggaaagggctgggcctcaccgctcccagcaactgaaaggacaacactatctggagccacccactgaaagggctgcaggcatgggctgtacccaagctgatttctcatctggtcaataaagctgtttagaccagaaaaaaaaaaa

SEQ ID NO: 298 - DNA, 2964 bp, Homo sapiens
  misc_feature: Incyte ID No: 237613.7
cgcagatgtgccttcctggttggttgagatgctgatcctacagcactcccgctgtgcctcagcagtgagctgggtgtaaaggcaggaggcttgctggggtctgacacttccctgccctcctccaggagggacacatctggggctctatgaggaggacagctttcatcctgggctctggacttctctcatttgtggccttctggaactcagtgacatggcatcttcagagattttggggtgcttctggctacttttggcaagcccagtgggagaggctgctgactacatttgaagggaaggagtggatcctcttctttataggtgccatccaagtgccttgtctcttcttctggagcttcaatgggcttctattggtggttgacacaacaggaaaacctaacttcatctctcgctaccgaattcaggtcggcaagaatgaacctgtggatcctgtgaaactgcgccagtctatccgcacagttcttttcaaccagtgcatgatatctttccccatggtggtcttcctctatcccttcctcaaatggtggagagacccctgccgccgtgagctacccaccttccactggttcctcctggagctggccatcttcacgctgatcgaggaagtcttgttctactattcacaccggctccttcaccacccaacattctacaagaaaatccacaagaaacaccatgagtggacagctcccattggcgtgatctctctctatgcccaccctatagagcatgcagtctccaacatgctaccggtgatagtgggcccattagtaatgggctcccacttgtcctccatcaccatgtggttttccttggccctcatcatcaccaccatctcccactgtggctaccaccttcccttcctgccttcgcctgaattccacgactaccaccatctcaagttcaaccagtgctatggggtgctgggtgtgctggaccacctccatgggactgacaccatgttcaagcagaccaaggcctacgagagacatgtcctcctgctgggcttcaccccgctctctgagagcatcccagactccccaaagaggatggagtgagagacagcctaagtgtcatcctggctgtccctcagccatgggatgcagacacggcttcctgattgcacctaacaatttgcctccttcggccacacgccctaatgatggcaccaccagggtagagggaaggtcggcttcccggaaaagcagggccaaggatgaggctttcttcaaactactgcccttgatgtccctcaatgggatcaggagttagcttaagaaaaaggaaaacacagctccccagactggaggctggtcagagggaggagacccctggtcctctgctgtggaaggagaggggttcagccccagataactcctttgtggcctgggcaggatgcagagaatgacaaggctgaaaggagggggactggaggctgcctggctccagcgagagctccttctgggaccagagggtgggacggccaggtatcactttgccccttcctgccccaaaaggctttcacatacccgactcaggccagagccaagacaccctggcaaatcattataggtctcaattcatgacataccagatgccagtcgccacttcacccaacacacacacaaacatacacacaccaaacactctgagtgagtggtaaaggccccgttttaactctggcccaccgcaaacaaaaggtttccctctgtgggggagaaaaagaaatccaggagctcctccctggattaaaaccaacgaggtgcagaccaaactttaacacctttagccttatgtggaaaccaaaaaccaactgctgggaaactgtgaaaagcccttttacccacaaggggaggggtcaaagttgctgccctttggggacacccgagacccctaattagcctatctgaatgaggaccaaaggttagagccctctttctccccgaagaaagagcccggaaaaacatggcagagcaaagagcaaaatcctttctcccccgaatgctttaccagtttctcagcaacatttattcaagatgatttttaccaggaaccttatcaaaggcaaaaccacagctgcttgggttgaagtccccatcctggcctcctctcagccgccagacatggccaggaaccctgtggttcccaagaacaatttaaagatcactctttgatttgaaagaccaccattatcattttactaaattcttatatatacttgtgccttttccaactttcagttctcttaagaaaaacatccactgtagctttataaaataccttagtatcagctaggtccaagtctccaggcaggactatcaaaatggactccttcttcctatcagctctagaaccccagaggacttgcccagtaggccagctgagcacttaccaggcagcatctccctggccttccacagtctcgcctgtctgtctctggccttggtggacctggctccctccctaggaggcttttgccctcagcttgaatacagttcctggtgcatcaaagctgtaagttctcagctgctggcctgcactcatcacctcttcctacaaataaacatttggaaaaaagtccatcttcaatatgcttaaagagaagggtaggagataaggagaaagaacagatacggtttttttcccctttaaggcctttagattttgaggtactgtaaggggcctagaaggacaaaaggctttcattccctcttccttttggcaggcaggttatcagtccttggcagaagggcccagccctatccttttctgtatcaaacaaaatccttgaggttggtatacaagttaaggctgaaaaaaggccttaaattcccagtaaagaatgtgaaagcaagcatgtaaaataaactggtcttcatgaattaaaaaccacggcgcaactggtcgtgattctttaaacggacccgctattatcagatcatg

SEQ ID NO: 299 - DNA, 936 bp, Homo sapiens
  misc_feature: Incyte ID No: 2630652CB1
cgtttcgggtgctggcggctgcagccggagttcaaacctaagcagctggaagggccctgtggctaggtaccatagagtctctacacaggactaagtcagcctggtgtgcaggggaggcagacacacaaacagaaaattggactacagtgctaagatgctgtaagaagaggttaactaaaggacaggaagatggggccaagagatggtgctactgtctactttagggatcgtctttcaaggcgaggggcctcctatctcaagctgtgatacaggaaccatggccaactgtgagcgtaccttcattgcgatcaaaccagatggggtccagcggggtcttgtgggagagattatcaagcgttttgagcagaaaggattccgccttgttggtctgaaattcatgcaagcttccgaagatcttctcaaggaacactacgttgacctgaaggaccgtccattctttgccggcctggtgaaatacatgcactcagggccggtagttgccatggtctgggaggggctgaatgtggtgaagacgggccgagtcatgctcggggagaccaaccctgcagactccaagcctgggaccatccgtggagacttctgcatacaagttggcaggaacattatacatggcagtgattctgtggagagtgcagagaaggagatcggcttgtggtttcaccctgaggaactggtagattacacgagctgtgctcagaactggatctatgaatgacaggagggcagaccacattgcttttcacatccatttcccctccttcccatgggcagaggaccaggctgtaggaaatctagttatttacaggaacttcatcataatttggagggaagctcttggagctgtgagttctccctgtacagtgttaccatccccgaccatctgattaaaatgcttcctcccaaaaaaaaaaaaaa

SEQ ID NO: 300 - DNA, 1572 bp, Homo sapiens
  misc_feature: Incyte ID No: 5785224CB1
ggcgacgctggcgagggtggcagctctgcgcagaacctgcctcttctccggccggggcggcgggagggggctgtggactggccgcccgcagtcagatatgaacaatataaagccattggaaggggtaaaaattctggatctaacaagagtcctggcgggaccttttgctactatgaatttaggagatcttggagcagaagttataaaagtggagagaccaggagctggtgatgatacacgaacttgggggccaccttttgttgggacagaaagtacatattatctcagtgttaaccgaaataaaaaaagtattgctgttaatatcaaggatccaaaaggggtgaaaatcatcaaagagcttgcagctgtttgtgatgtgtttgtggaaaactatgtccctggcaaactgtctgcaatgggcctgggatatgaagatatagacgagattgctcctcacatcatctattgttccatcacagggtatggtcagacaggtccaatttctcagcgagctggttatgatgctgttgcctcggctgtttctggtctgatgcacatcacagggcctgagaatggagatccagttcgcccaggagtagctatgactgatcttgccactggcctgtatgcatatggagctattatggctggattgatacaaaaatacaaaactgggaaaggactgttcattgattgtaacctactgtcatcccaggtggcgtgtttgtctcacatagctgcaaattatcttattggtcaaaaggaagcaaaacgttggggtacagctcatggcagtatcgttccttaccaggcttttaaaaccaaggatggctatattgtagttggagcaggaaataaccagcagtttgccaccgtctgcaagatcttggatttgcctgagttgattgataattccaagtataaaactaaccaccttcgggtacacaatagaaaagagcttattaaaatattatctgaacggtttgaagaagaactgaccagcaagtggttatatctttttgaaggcagtggagtcccgtatggcccaatcaacaacatgaagaatgtatttgcagaacctcaggtattacacaatggcctcgttatggagatggagcatccaactgtggggaagatttccgtcccaggcccagctgtgagatacagtaagttcaagatgtcagaggccaggccgcccccgctgctcgggcagcacacaacgcacatcctgaaggaggtcctgagatacgatgacagggccatcggggagctgctcagcgctggagtggtggaccaacatgaaactcactgacaaaggaaaagggctcttcctcataacctcgatccgaatacactggcaaaggcaacactttgcttggacccttctccccagttctgataccactaaaaagaagatttagagtaactccagatttcttacatggcatctccagaatggctctggtattaatgaatctagtgccttttaaatgtatcccacgttttgttccctaccatcttttttttcagatgatgatttcattatggatttgtgggatttttaaaaataaa

SEQ ID NO: 301 - DNA, 991 bp, Homo sapiens
  misc_feature: Incyte ID No: 409911.8
  unsure 126: a, t, c, g, or other
ctggaagaacaggacacaaacggcgtgggctgttcgatgaacacgccgaccaggaccgtggcagagcttcatccccaatgccctgagctgcgcaagccttcgcacacacggtgcagcctgtttcgngtccagaagcgcgggatgtagttgcccaggtagttcaactgcagcttggttggcccgttgccatggatcaggaccgggagggtggagggagggcgcgcagtcccagcccagagcttcaaaacagcccggcggcctcgcctcgcacccccagccagtccgtcgatccagctgccagcgcagccgccagcgccggcacatcccgctctgggctttaaacgtgacccctcgcctcgactcgccctgccctgtgaaaatgttggtgcttcttgctttcatcatcgccttccacatcacctctgcagccttgctgttcattgccaccgtcgacaatgcctggtgggtaggagatgagttttttgcagatgtctggagaatatgtaccaacaacacgaattgcacagtcatcaatgacagctttcaagagtactccacgctgcaggcggtccaggccaccatgatcctctccaccattctctgctgcatcgccttcttcatcttcgtgctccagctcttccgcctgaagcagggagagaggtttgtcctaacctccatcatccagctaatgtcatgtctgtgtgtcatgattgcggcctccatttatacagacaggcgtgaagacattcacgacaaaaacgcgaaattctatcccgtgaccagagaaggcagctacggctactcctacatcctggcgtgggtggccttcgcctgcaccttcatcagcggcatgatgtacctgatactgaggaagcgcaaatagagttccggagctgggttgcttctgctgcagtacagaatccacattcagataaccattttgtatataatcattattttttgaggtttttctagcaaacgtattgtgcct

SEQ ID NO: 302 - DNA, 1273 bp, Homo sapiens
  misc_feature: Incyte ID No: 2418523CB1
gtaggagaaaggataagaaagggagtgggactggcgcctacggtggccgaagtgggacgcgccgagccggaggtgcaggatgatgcggttcatgctattattcagccggcagggaaaactgcggctgcaaaaatggtacctggccacttcggacaaggaacggaagaagatggtgcgcgagctcatgcaggttgtcctggctcgaaagcccaagatgtgcagcttcctggagtggagggacctcaaagttgtctataagagatatgccagcctctacttctgctgcgccatcgagggccaagacaatgagctcatcacactggagctgatccaccgatacgtggagctcttagacaaatactttggcagtgtgtgcgagctggacatcatcttcaactttgagaaggcctacttcatcctggatgagtttttgatggggggggatgtccaggacacctccaagaagagtgtgctgaaagccatcgagcaggctgacctactgcaagaggaggatgagtcgccacggagtgtgctggaggagatgggtttggcatagcccctgctgggccggggtgtggcgatggggtcctggcagcgtggcgggaacggctgcttctcctctgcccagggccctgttcttggtgggaattcggctgcccctcctctgctgcctcacctttcggagtgagctgtgggctcaggcccttcaaacattccctccctccaccccctacctccactttccccttttcccactgaaggttttagaagctaggaggcaggaaaatgtgacccagatgggggtgctatttggcttttattccctgcctttgcagaactgatgtcacctcagatgtccttccctccctaataactgtaaatatataaatatgtcaggttaaagggaaaaggtgttcagggcacttcttgtcctctctgtcccataacctacctccacctccaccctccccctagccagccaggcagcttctctgcctgggaggggagcctggacccccctctttctccttggctgcagtggggcctttatccagtgccagggaggaacaacatagttaatttttttctaaccttgccactttgagggaaggaagggttgggggaagggcaagctttatgggaccctggtcctggccctggcctttcactccagttctgggtgaggcaggagctgggaggggtgtccaagggggagggggaagtgtctgcctttatgtcctttcttctgaaataaaagtaaaagcatttctgg

SEQ ID NO: 303 - DNA, 888 bp, Homo sapiens
  misc_feature: Incyte ID No: 1091297.30
  unsure 689, 708, 710-713: a, t, c, g, or other
gaggatctaagccaggtctccttgaggaaacaacaggggtgccagacgtggcccgggcccctggctgggcccagttcggggtgtgtgggagctgaggactcactgggcttgaggactgactgatgtggagtgcagaggaggcttgggcctggaaccgagtgctttgttcctaacaggtgatgtcgagcctggcagagctggaggacgacttcaaagagggctacctggagacagtggcggcttattatgaggagcagcacccagagctcactcctctacttgaaaaagaaagagatggattacggtgccgaggcaacagatcccctgtcccggatgttgaggatcccgcaaccgaggagcctggggagagcttttgtgacaaggtcatgagatggttccaggccatgctgcagcggctgcagacctggtggcacggggttctggcctgggtgaaggagaaggtggtggccctggtccatgcagtgcaggccctctggaaacagttccagagtttctgctgctctctgtcagagctcttcatgtcctctttccagtcctacggagccccacggggggacaaggaggagctgacaccccagaagtgctctgaaccccaatcctcaaaatgaagatactgacaccacctttgccctcccagtcaccgcgcacccaccctgacccctccctcngctgtcctgtgccccgccntnnnnaaaacactcagtccccctgcctggcgttcctgccgcagctctgacctggtgctgtcgccctggcatcttaataaaacctgcttatacttccctggcaggggagataccatgatcgcggaggtgggtttcccagggcaaggctgatctgttgccgtattagtccgttttcacacag

SEQ ID NO: 304 - DNA, 758 bp, Homo sapiens
  misc_feature: Incyte ID No: 369213.2
aaaagctgatccacaaacaagaggagcaccagacctcctcttggcttcgagatggcttcgccacaccaagagcccaaacctggagacctgattgagattttccgccttggctatgagcactgggccctgtatataggagatggctacgtgatccatctggctcctccaagtgagtaccccggggctggctcctccagtgtcttctcagtcctgagcaacagtgcagaggtgaaacgggagcgcctggaagatgtggtgggaggctgttgctatcgggtcaacaacagcttggaccatgagtaccaaccacggcccgtggaggtgatcatcagttctgcgaaggagatggttggtcagaagatgaagtacagtattgtgagcaggaactgtgagcactttgtcacccagctgagatatggcaagtcccgctgtaaacaggtggaaaaggccaaggttgaagtcggtgtggccacggcgcttggaatcctggttgttgctggatgctcttttgcgattaggagataccaaaaaaaagcgacagcctgaagcagccacaaaatcctgtgttagaagcagctgtgggggtcccagtggagatgagcctcccccatgcctccagcagcctgaccctcgtgccctgtctcaggcgttctctagatcctttcctctgtttccctctctcgctggcaaaagtatgatctaattgaaacaagactgaaggatcaataaacagccatctgccccttcaaaaaggactt

SEQ ID NO: 305 - DNA, 530 bp, Homo sapiens
  misc_feature: Incyte ID No: 221869.5
ctcttcccgaatggtggtgccaaaggcagccatttaccaaacacaggccttctatgccaaagggaaaatgaaggaagtaaaacagcttgtggctaacttgcgtggggaatccttatcatctggaaagacagagacgtggaatggcaagttgctgaaaattccaccagtttctccctctatcctcgactgtagtataatccgcgtggaatattcactaatggtatatgtggatattcctggagctatggatttatttcttaatttgccacttgtcatcggtaccattcctctacatccatttggtagcagaacctcaagtgtaagcagtcagtgtagcatgaatatgaactggctcagtttatcacttcctgaaagacctgaagaacatgctgttcgaattgcgtgtatctttttccttcagcaccacccagctatgcagaagtggtaacagaggaacaaaggcggaacaatcttgcaccagtgagtgcttgtgatgactttgagagagcccttcaggaccactgtttgca

SEQ ID NO: 306 - DNA, 3207 bp, Homo sapiens
  misc_feature: Incyte ID No: 995529.6
ctggctcttggaaattgagcggagagcgacgcggttgttgtagctgccgctgcggccgccgcggaataataagccgggatctaccatacccattgactaactatggaagattataccaaaatagagaaaattggagaaggtacctatggagttgtgtataagggtagacacaaaactacaggtcaagtggtagccatgaaaaaaatcagactagaaagtgaagaggaaggggttcctagtactgcaattcgggaaatttctctattaaaggaacttcgtcatccaaatatagtcagtcttcaggatgtgcttatgcaggattccaggttatatctcatctttgagtttctttccatggatctgaagaaatacttggattctatccctcctggtcagtacatggattcttcacttgttaaggtaaaagcttaactaattttattaatatttatgcactgtggatataaagggactatatatagaagtccctgcattttgtgggaatatgcttggaaaaagtgttagaataagaaaaagtatttcatttttctccctcatggttagtttatacaggttagagatacccatgttattaccagatagtgtttctagtaagtaaaaattagtgcctgagataacatagaactggtaagtattgttggaagctagggtagtctggtctttctttggctgtcagatacatgtaaaacaaagtaatgaaagcctagggcagagtggtggttgtaggtgttttattccagttttgaacatgttttggtcaatttattgtagacatttattatatttcaggtaaattataaaattgtatagttttaagtactgaagtatataaaagtgtcttattcttgcaccagttctaccaaaccactctgcagaggtagcgctgttagttttatttgtaatcttacacttgtatgtatgttcactttgtatgtatataaatatttttttttttacacaaggtgggcttatttgcatatgtatatatacatattttcccttttttgtgtaaaacattatcaagacgtagatctacctatgtctatttacatttttgatataattaaaccacttccatattgatgaacatttaaattattttccaacttggttattgttgctcttattaacagtactgcactgaatgtccttatagatatttatctttgtatgcaactttataggataaatttttagaatgggaatgatggattgaagatgtttatttacattttgatagatattgccggttgccccctaaaaaacttgtagcaatttactcttaaatactcatggtgtgtaatacttattgttttagtacatcattgccaaaacttggttttatcaatctgttaactatgtgaaaaaggcatattaagattgttttaattttatatttcatgacaatttaacacttcatatttagctattataaaccgcctatattttcgttaggatacgttctttaacaatcttgcatgacttttggactttctgcttttatgtcttgcttaagtcttcctcactcaaagatcgaatgtattagaataatacatgtcagtatttttctggtaattttagtaagtcctgtcttccacacatactttttttgtcttaaattctgtattaagatttattttgacttaaaaactgggatacagattctgctttatctttttccaaatggctagccagttgttctaactggttttatgtacaggcaacaatggttttacttacaatttttcagttttacaatgaagcagaaatgatgcacattcactagaaaccatacttcatttacccatacaaccattctgttttttcactttcagtacagtattcaataaataatgaggtattcaacacttccaactatatgctaatgtaagtgttttgagcacaattaaggtgggctacgcttagctacgtttggtaggttaggtgtgttcaatgcatttcgacaaggtattttcaacttagaatgagtttaaccagatggatcatccgttttgttttgttttttgaacaccacttgtccctctaagatggagcatctgtattactttccaatttcaaactgtaagtcatttttctgtgtactttgtttttgtaatatccatgctacttcagatgtcaatgacattgtctttggcaacaaatgtcttgtaaagcacttttctctgaactaagcagcattttatgataattttatccattgaaatatataatcataatatctttgccatcacttttagaatctaattttttcaagaaggaaatgaatatgtaaaaatgaaagaaaaggccaactgtattgaagatacaaaatagagttggtagcggtatatagaagaaaaatcaagaggcttctgtgtagaaaaccaatttgtaatttaaggatcggggaccaaaaatttttaaagactaaatgtgttcacattactatagatatgtctataaggtgaagattcttttcttaggtatacaaatgtgatgttgtatataaatgggcttcccacccacaaatgcttattagcctaaaatggcctgaaagctctagtaattaaattatttctctgcgtcctaattttttgtctttgaaacagattatttagaaaatcatgtacttcgcttaagtttctaacttttacttgctttttccagagttatttataccaaatcctacaggggattgtgttttgtcactctagaagagttcttcacagagacttaaaacctcaaaatctcttgattgatgacaaaggaacaattaaactggctgattttggccttgccagagcttttggaatacctatcagagtatatacacatgaggtagtaacactctggtacagatctccagaagtattgctggggtcagctcgttactcaactccagttgacatttggagtataggcaccatatttgctgaactagcaactaagaaaccacttttccatggggattccgaacttgatcaactcttcacgatttcagagctttgggcactcccaataatgaagtgtggccagaagtggaatctttacaggactaagaatacatttcccaaatggaaaccaggaagcctagcatcccatgtcaaaaacttggatgaaaatggcttggatttgctctcgaaaatgttaatctatgatccagccaaacgaatttctggcaaaatg

SEQ ID NO: 307 - DNA, 4399 bp, Homo sapiens
  misc_feature: Incyte ID No: 982959.1
  unsure 3124, 3519: a, t, c, g, or other
cagctgcggcctgggggtctccactcggatctccaatgttaacgcccagtgctggcctgagcaagagagccgcctctgcaacttgcggccatgcgatgtggacatccatacactcattaaggcagggaagaagtgtctggctgtgtaccagccagaggcatccatgaacttcacacttgcgggctgcatcagcacacgctcctatcaacccaagtactgtggagtttgcatggacaacaggtgctgcatcccctacaagtctaagactatcgacgtgtccttccagtgtcctgatgggcttggcttctcccgccaggtcctatggattaatgcctgcttctgtaacctgagctgtaggaatcccaatgacatctttgctgacttggaatcctaccctgacttctcagaaattgccaactaggcaggcacaaatcttgggtcttggggactaacccaatgcctgtgtaagcagtcagcccttatggccaataacttttcaccaatgagccttagttaccctgatctggacccttggctccatttctgtctctaaccattcaaatgacgcctgatggtgctgctcaggcccatgctatgagttttctccttgatatcattcagcatctactctaaagaaaaatgcctgtctctagctgttctggactacacccaagcctgatccagcctttccaagtcactagaagtcctgctggatcttgcctaaatcccaagaaatggaatcaggtagacttttaatatcactaatttcttctttagatgccaaaccacaagactctttgggttcattcagatgaatagatggaatttggaacaatagaataatctattatttggagcctgccaagaggtactgtaatgggtaattctgacgtcagcgcaccaaaactatcctgattccaaatatgtatgcacctcaaggtcatcaaacatttgccaagtgagttgaatagttgcttaattttgatttttaatggaaagttgtatccattaacctgggcattgttgaggttaagtttctcttcacccctacactgtgaagggtacagattaggtttgtcccagtcagaaataaaatttgataaacattcctgttgatgggaaaagcccccagttaatactccagagacagggaaaggtcagcccatttcagaaggaccaattgactctcacactgaatcagctgctgactggcagggctttgggcagttggccaggctcttccttgaatcttctcccttgtcctgcttggggttcataggaattggtaaggcctctggactggcctgtctggcccctgagagtggtgccctggaacactcctctactcttacagagccttgagagacccagctgcagaccatgccagacctactgaaatgaccaagacaggttcaggtaggggtgtgggtcaaaccaagaagtgggtgcccttggtagcagcctggggtgacctctagagctggaggctgtgggactccaggggccccccgtgttcaggacacatctattgcagagactcatttcacagcctttcgttctgctgaccaaatggccagttttctggtaggaagatggaggtttaccggttgtttagaaacagaaatagacttaataaaggtttaaagctgaagaggttgaagctaaaaggaaaaggttgttgttaatgaatatcaggctattatttattgtattaggaaaatataatatttactgttagaattcttttatttagggccttttctgtgccagacattgctctcagtgctttgcatgtattagctcactgaatcttcacgacaatgttgagaagttcccattattatttctgttcttacaaatgtgaaacggaagctcatagaggtgagaaaactcaaccagagtcacccagttggtgactgggaaagttaggattcagatcgaaattggactgtctttataacccatattttccccctgtttttagagcttccaaatgtgtcagaataggaaaacattgcaataaatggcttgattttttaatgtcatttttccctcttatagtctttctagctccttttcaaaagacgagaatatctgattttctgataatttaggtgcttaagcatccaaaatacatgggacacacaaaaatccaggaatcccctgtagcttattccctctttcccatcggaaccagctctcatcacacatttaaaagatgattctgtttacccaatgctgcatattgaatgttgtgtagttattcacagggaattctgtgcagtgtgcagagagattcctaaacgggaaaaggactgggaatacatcctccttactgtgacctccccaaaacctagtccagtgcaaggtatacagtggtgctcattaaatacttgatgaatacaggaagctgtgcatgtgttcctacttttattcgaagctctcttcttccaaagctacatgaaaatagaattttaacagtcaaaattttatattaagtgtcttagcaaaagagacatttaatatttcaaagaaatgcatatgtatgtatacatatatttgtgtatgcgtatgcaagaattcttgtataaagagaattcactccatgaatgatctcttctgtaagtcagtgtgaatcatgttagattttctgagagtgaaaacacctgccatctacaaattacaaggctggataacagctcactccatttgaaattcagtggaaacccaagagctaggttcttactgaatttgcatctcaatttgggaaactgaacttagctttcaaagatcataggaagtctggttggagaaactagggattattctggcaatgggtggaggaaggtggtcagaataacccagtcgccattggttttgagaaacggaactatcttatgcagagcccggagggcaagtctcagacccatgggttgaagccatggagaaggaaatttggatccaatgtaatgaagctctttctaagtcagaatttccctgcaatggtgtggcctgattcaataaaaattaagaataataaatataatggaaaaaaatctccactgattgagtgtttacttggtgccaagcactatgctaagttgttcattattttatttaattnttacagcaattttgagtatgcatctttcactattttataagtggaaaagagaagtgcccccaaaaagttagagctcaaacagcagcttattctaccagcccctgctcttgcggaggcctctggaaaagacctgaatgacacctattggagaatcacatctacaaggggcttcaaacagaccaaatagatcatcacctctgtggtcccttgttaactatatgttctgagacaaaggaaagctaccctaagggttagttaacctttgctgaggaaatttacattcatacttagagtgaattactcaggtgtgcttaggtgtgcaaaagggaaggagacctgaattcaccaagttaaatcttgctaaaccttatcataagcattttttgagcgcttanatacaccaagccttgtggaaggtgctttcctgccatatctcatttaatcctcacagcaaacctatagaatatggcattatcatctgagtctcacagaagtttagtcgtgtactcaaggtcttaccagctagtgaacagcagaccaagactggaaacccaggatagtctgatacctgagccatctcttcttgtgctacgcctagttattctgtcccccaaatcaaaaggcatgacctttataagaggcgctttactgacaatagctgcaattttaactttgaaaatgattcagaattatcaaagatagtagattcgaatgacatgattgtctataatctcgctagccttgtactgtgtgtgcatagcaattacagggaagtaatctagctcctgactattatgttgaactatgtcgctgctttttacaaacttgtcttgatccaaagcagtcacaatgataaccctgcatatctgggaatcataagtcaactatgtatccctgtgtgtgtatatatatgtatgtatgtatctagttttcaaactgtgatttaatatttaaatattcctactgccatttttgtgactgaaaaactacacatgaggaaacgtcttagaattttccaatagaggaaaaataacacttgggcaatctgtcatgtttcacaacagttctcatttttctcatgatttgtgtagcgtggaatgtgtttgctcaatgtgaagggttttcattgctcaatttctctgtgtaagtcttttccttaaggtaataaaccatcagcaaagtcacatactggagttggtggcttttcttgtacaggcagttgttatgagacaatgatggagcattgagcatgttcaataaatgtgcagatggtgg

SEQ ID NO: 308 - DNA, 487 bp, Homo sapiens
  misc_feature: Incyte ID No: 342074.1
gatttccatatctgacctacagcaatggtggaggcgccttcttgataccttatgcaattatgttagcattggctggtttacctttgttctttctggagtgttcactgggacaatttgctagcttaggtccagtttcagtttggaggattcttccattgtttcaaggtgtgggaattacaatggtcctgatctccatttttgtgacaatctattacaatgtcataattgcctatagtctttactacatgtttgcttcttttcaaagtgaactaccatggaaaaattgttcttcgtggtcagataaaaactgtagcagatcaccaatagtaactcactgtaatgtgagtacagtgaataaaggaatacaagagatcatccaaatgaataaaagctgggtagacatcaacaattttacctgcatcaacgggcagtgaaatttatcagcccagggcagctttcccagtgaaccaatattggaataaaagtg

SEQ ID NO: 309 - DNA, 1242 bp, Homo sapiens
  misc_feature: Incyte ID No: 245194.2
gtacaggaaaggcctcttgatgttgactgtaaacgcctaagccccggatcggtgcaagtgtaaaaaggtgaagccaactttggcaacgtatctcagcaaaaactacagctatgttattcatgccaaaataaaagctgtgcagaggagtggctgcaatgaggtcacaacggtggtggatgtaaaagagatcttcaagtcctcatcacccatccctcgaactcaagtcccgctcattacaaattcttcttgccagtgtccacacatcctgccccatcaagatgttctcatcatgtgttacgagtggcgctcaaggatgatgcttcttgaaaattgcttagttgaaaaatggagagatcagcttagtaaaagatccatacagtgggaagagaggctgcaggaacagcggagaacagttcaggacaagaagaaaacagccgggcgcaccagtcgtagtaatccccccaaaccaaagggaaagactcctgctcccaaaccagccagtcccaagaagaacattaaaactagggagtgcccagaagaaaacaaacccgaaaagagtgtgagctaactagtttccaaagcggagacttccgacttccttacaggatgaggctgggcattgcctgggacagcctatgtaaggccatgtgccccttgccctaacaactcactggcagtgctcttcaaagacacatcttgcagcatttttcttaaggctatgcttcagtttttctttgtaagccatcacaagccatagtggtaggtttgccctttggtacagaaggtgagttaaagctggtggaaaaggcttattgcattgcattcagagtaacctgtgtgcatactctagaagagtagggaaaataatgcttgttacaattcgacctaatatgtgcattgtaaaataaatgccatatttcaaacaaaacacgtaatttttttacagtatgttttattaccttttgatatctgttgttgcaatgttagtgatgttttaaaatgtgatcgaaaatataatgcttctaagaaggaacagtagtggaatgaatgtctaaaagatctttatgtgtttatggtctgcagaaggatttttgtgacgaaaggtgattttttgaaaaatctagagaagtagcatatggaaaactataatgtgtcttttttacaatgacttcagctctgtttttagctagaaactctaaaaacaaaaataataattaagaaaaataaattaaaaggagaggc

SEQ ID NO: 310 - DNA, 888 bp, Homo sapiens
  misc_feature: Incyte ID No: 246444.6
cggtcgaccacggtccgcgacgcgtgggctgaacagctcgactttctctgcacagcaggtccagcatcctttgaaacatgagttcttaccagcagaagcagacctttaccccaccacctcagcttcaacagcagcaggtgaaacaacccagccagcctccacctcaggaaatatttgttcccacaaccaaggagccatgccactcaaaggttccacaacctggaaacacaaagattccagagccaggctgtaccaaggtccctgagccaggctgtaccaaggtccctgagccaggttgtaccaaggtccctgagccaggatgtaccaaggtccctgagccaggttgtaccaaggtccctgagccaggctacaccaaggtccctgagccaggcagcatcaaggtccctgaccaaggcttcatcaagtttcctgagccaggtgccatcaaagttcctgagcaaggatacaccaaagttcctgtgccaggctacacaaaggtaccagagccatgtccttcaacggtcactccaggcccagctcagcagaagaccaagcagaagtaatttggtgcacagacaagcccttgagaagccaaccaccagatgctggacaccctcttcccatctgtttctgtgtcttaattgtctgtagaccttgtaatcagtacattctcaccccaagccatagtctctctcttatttgtatcctaaaaatacgtactataaagcttttgttcacacacactctgaagaatcctgtaagcccctgaattaagcagaaagtcttcatggcttttctggtcttcggctgctcagggttcatctgaagattcgaatgaaaagaaatgcatgtttcctgctctgccctcattaaattgcttttaattcc

SEQ ID NO: 311 - DNA, 2914 bp, Homo sapiens
  misc_feature: Incyte ID No: 374054.4
ccaggttcagccctgcccctaccctcattttgctccccagctctgactcctttgtacccctcaccgcagccctgcccccctgagcagccagacccccgggccctgcagtgcgcagcctttaactcccaggaattcatgggccagctgtatcagtgggagcccttcactgaagtccagggctcccagcgctgtgaactgaactgccggccccgtggcttccgcttctatgtccgtcacactgaaaaggtccaggatgggaccctgtgtcagcctggagcccctgacatctgtgtggctggacgctgtctgagccccggctgtgatgggatccttggctctggcaggcgtcctgatggctgtggagtctgtgggggtgatgattctacctgtcgccttgtttcggggaacctcactgaccgagggggccccctgggctatcagaagatcttgtggattccagcgggagccttgcggctccagattgcccagctccggcctagctccaactacctggcacttcgtggccctgggggccggtccatcatcaatgggaactgggctgtggatccccctgggtcctacagggccggcgggaccgtctttcgatataaccgtcctcccagggaggagggcaaaggggagagtctgtcggctgaaggccccaccacccagcctgtggatgtctatatgatctttcaggaggaaaacccaggcgttttttatcagtatgtcatctcttcacctcctccaatccttgagaaccccaccccagagccccctgtcccccagcttcagccggagattctgagggtggagcccccacttgctccggcaccccgcccagcccggaccccaggcaccctccagcgtcaggtgcggatcccccagatgcccgccccgccccatcccaggacacccctggggtctccagctgcgtactggaaacgagtgggacactctgcatgctcagcgtcctgcgggaaaggtgtctggcgccccattttcctctgcatctcccgtgagtcgggagaggaactggatgaacgcagctgtgccgcgggtgccaggcccccagcctcccctgaaccctgccacggcaccccatgccccccatactgggaggctggcgagtggacatcctgcagccgctcctgtggccccggcacccagcaccgccagctgcagtgccggcaggaatttggggggggtggctcctcggtgcccccggagcgctgtggacatctcccccggcccaacatcacccagtcttgccagctgcgcctctgtggccattgggaagttggctctccttggagccagtgctccgtgcggtgcggccggggccagagaagccggcaggttcgctgtgttgggaacaacggtgatgaagtgagcgagcaggagtgtgcgtcaggccccccacagccccccagcagagaggcctgtgacatggggccctgtactactgcctggttccacagcgactggagctccaagtgctcagccgagtgtgggacgggaatccagcggcgctctgtggtctgccttgggagtggggcagccctcgggccaggccagggggaagcaggagcaggaactgggcagagctgtccaacaggaagccggccccctgacatgcgcgcctgcagcctggggccctgtgagagaacttggcgctggtacacagggccctggggtgagtgctcctccgaatgtggctctggcacacagcgtagagacatcatctgtgtatccaaactggggacggagttcaacgtgacttctccgagcaactgttctcacctccccaggccccctgccctgcagccctgtcaagggcaggcctgccaggaccgatggttttccacgccctggagcccatgttctcgctcctgccaagggggaacgcagacacgggaggtccagtgcctgagcaccaaccagaccctcagcacccgatgccctcctcaactgcggccctccaggaagcgcccctgtaacagccaaccctgcagccagcgccctgatgatcaatgcaaggacagctctccacattgccccctggtggtacaggcccggctctgcgtctacccctactacacagccacctgttgccgctcttgcgcacatgtcctggagcggtctccccaggatccctcctgaaaggggtccggggcaccttcacggttttctgtgccaccatcggtcacccattgatcggcccactctgaaccccctggctctccagcctgtcccagtctcagcagggatgtcctccaggtgacagagggtggcaaggtgactgacacaaagtgactttcagggctgtggtcaggcccatgtggtggtgtgatgggtgtgtgcacatatgcctcaggtgtgcttttgggactgcatggatatgtgtgtgctcaaacgtgtatcacttttcaaaaagaggttacacagactgagaaggacaagacctgtttccttgagactttcctaggtggaaaggaaagcaagtctgcagttccttgctaatctgagctacttagagtgtggtctccccaccaactccagttttgtgccctaagcctcatttctcatgttcagacctcacatcttctaagccgccctgtgtctctgaccccttctcatttgcctagtatctctgcccctgcctccctaattagctagggctggggtcagccactgccaatcctgccttactcaggaaggcaggaggaaagagactgcctctccagagcaaggcccagctgggcagagggtgaaaaagagaaatgtgagcatccgctcccccaccaccccgcccagcccctagccccactccctgcctcctgaaatggttcccacccagaactaatttattttttattaaagatggtcatgacaaatgaaaaaaaacaaaaac

SEQ ID NO: 312 - DNA, 4446 bp, Homo sapiens
  misc_feature: Incyte ID No: 001322.4
gcgagttgccaggcgagacaggaacttctttccccttctctgtgtcaggatcgcagaaagtatgtcccttctctcaccatgagctggctctccagttcccagggagtggtactaacagcctaccaccccagcggcaaggaccaggccgtcgggaacagccatgcaaaggcaggggaggaagccacctcgagtcgcagatatggccagtacactatgaaccaggaaagcaccaccatcaaagttatggagaagcctccatttgatcgatcaatttcccaggattctttggatgaactatctatggaagactattggatagaactagaaaacatcaagaaatctagtgaaaacagccaagaagatcaagaggtggttgttgtcaaagagcctgatgagggagaattggaagaagagtggcttaaagaggccggtttatccaatctcttcggagagtctgctggagatccacaggaaagcattgtgtttttatcaacattgacgcggacccaggcagcagcagttcagaagcgagtagagacggtctcccagaccttgaggaaaaaaaacaaacagtaccagattcctgacgtcagagacatatttgctcaacagagagaatcaaaagaaacagctccaggtggcactgaatcgcagtcacttagaacaaatgaaaacaaataccaaggaagagatgacgaggcatctaaccttgttggtgaagagaagctgatcccacctgaggagacgcctgcccctgaaacagacatcaacctggaggtatcatttgccgagcaagcactcaatcagaaagagagctccaaggagaaaatccagaagagcaaaggcgatgatgccacattacctagtttcagattgccaaaagacaaaacgggtaccacaaggattggtgacctcgcaccccaggacatgaagaaagtttgccatttagccctaattgagctgactgccctctatgatgtattgggtattgagctgaaacaacaaaaagctgtgaaaatcaaaacaaaagattctggtcttttttgcgttccattgacagcgctattagaacaagatcagaggaaagtaccaggaatgcgaatacccttgatctttcaaaaactgatttctcgaattgaagagagaggtttggaaacagaaggcctcttacggatccctggagctgccattagaatcaagaatctttgccaagaactagaagcaaagttttatgaagggacttttaattgggaaagtgtcaaacagcatgatgccgccagcctgctgaagctcttcattcgggagttgccccagccactgctcagtgtggagtatctcaaagcctttcaggctgtccagaatcttccaaccaagaagcagcaactacaggctttgaaccttcttgtcatcctcctacctgatgcaaacagggacacactgaaggcccttcttgaatttctccaaagagtaatagataataaagaaaaaaataaaatgacagtcatgaatgtagcaatggtcatggccccgaatctctttatgtgtcatgcattgggattgaagtccagtgaacagcgagaatttgtaatggcagctgggacagcaaataccatgcacttattgattaagtaccaaaaacttctgtggacaattcccaagtttattgtaaaccaagtgaggaagcaaaacacggaaaatcataaaaaggataaaagagccatgaagaaattgctgaagaaaatggcttatgaccgagaaaaatatgaaaagcaagataagagtacaaatgatgctgacgttcctcagggagtgattcgagtgcaagctccccatctttcgaaagtttccatggcaatacagctaactgaagaactaaaagccagtgatgtacttgccaggtttctcagccaagaaagtggggttgcccagactctcaagaaaggagaagtttttttgtatgaaattggaggaaatattggggaacgctgccttgatgatgacacttacatgaaggatttatatcagcttaacccaaatgctgagtgggttataaagtcaaagccattgtagaagacttaacaagctgcagataaccatgtggacttctgtcataattcttgctgagtcaagagtgtaaataaaagaaatggcaggactcatattattcagttgtacccaagtatttaaaaatgactctcttaagccttaaaaagtcatagatttgtgctgctgccagaattatattaattattattaatgttattattagaaaaaaaatttctggagtgagagtaaagaggcttaattagtttgtgggcagttttcatatgctctgtgaaatgtgtccagatgtgacatagtttttttttttaatatgtggaaatgtcttctcttcccattcttttctcctaaaatcatatatactgtaatatatgctctctcacctctattacctcctcacatctaccctttcccagttaggtttgctttttgaccaaaaagataacaaataccaggtatggcaagttgtgaagacagcacattaaaacatacctaatttcacagtattcctgtcacgacagaatgttagtattcatctctttgaatcatttgctcaaataataacattccaccttttcctgctgtatcacaggaagtgatttgcattttttttcagttcatctgacttatgttcacagaaccgtatcagcgaccaagaaaataggactgtcagaagctgccagttattactgaaccattaaatacttatatactaagaataaataaaatatacccatgtgaaataataattggattatggataacaagagagtgaaagccaaagcactttctgtctactgtactcttctaaatggaattttaaaagtcatagctggctttacgtgttgtcattattagcattataaatatgcatgatagtataatccagtaatggttgaagaatgtattttacttaaagagggatttttttttttaagtcctgaataagtctactggaagaattattcttctgggtgaaaaagcttttgtttgtgttcttattttaaataatcggagtcaatttattaaaatgttcttgaaagtactattcccagggattttaatgcacaaaccatattgtgacaagagatgagcctctgtactgtaaataagaaatgaagtagagaaatgttaaatattttatgagtttagaatatagtaaataaaaggtgatgtaaatgaatgctgcacaaacggtgttcatgatacttttagtagtactttaggaaaaactacacattctcagaagctcttgatgtctctaatgaagggggggaatgctgttaatgagaacagtcataaatttttagcatataattacaagaacagcctgtggatatgatcacttaaatgattttgtggtgattcgtgccattgcttttttatttaaaagaaaattttgtaattaaatgcctttttctaaattatcttctcttggaatcattacttttaatcctatgtgtttatgagtatttttgcttttttttattaatattgagaaatggacttttttgttattaaaagtcacctctattttctattttctttgtaatttttaaagtaggaagatgtcagagatgtaaatatgttttcgtctttagtttttttccttttacaaatttttattcttcaggattttcaaaatacagtttagtctgtttctttgacaatatgtattaatttcccaattagcaaaatggtacttattagtgggttgaaaacaattaataatataaaagaaaaattaagtgcttaaaacattttaggagtatacaacttcaaaaaaaaagatagcagtgaggataatgatttaagtaaaaggttgtctgaagcatatgccaactaaatttcgcaacgtttgctacctacctgaaaaggagggtcaggagggagacacaacatatttttgatcatgaaaaagtatcttaattttaaaaaagtgaaaatgccattttattttgaatcccttttagaactcacgacccaagttcatcaatgttgaataatatcacgtttaaataacaaaaaaatatggactttaaaaaatctcaaattttttagagacagggtcttgctctgttttccagattggagtacagcagtgcattcgcggctaactgcagcctcaagcactggggctcaagcaaacctcctgcctcagcctcgtgagtagctaggaccacaggtgcatgccaccatgcctggctctaaagagaaaaaaaacttgataccatagagccttgaatataaatatcctgatgttaacctactgcttttgctgtgattttttttccttagtgagttttaaatctcaggctagatttttatttgtttttctgtgtgtgtatgagacaaaataaaaataaatatatttgccttgagttt

SEQ ID NO: 313 - DNA, 1392 bp, Homo sapiens
  misc_feature: Incyte ID No: 406438.12
tttttattataaagaaacatttgctaggaaataagctggatataaccatagttgtatctcctttagtgctacccagcactaaaaacttagacacgtatagggctgagcagctggtataatagagtgggctccgtctcattttctaagcctgtgagtcctagctgcctactgcagctcgatttgagtgggagttgatataatgtcttttttttttttctcacttcagcagtaagtatctggtttgctcatagtcttttgattaataggtagtttgaatatttttcaaagaatcagccaacatgtgattattttaaagatttaaataccagatagatattaaaatgcaaggttattgctactagatattacatctagctaaatcaaccattgtgaaataattgagaagtagagataataaagacataaaccaataaatctttgcttgaaaatcacaggtatgggaacagattgtgaggacagaaaaataaaaagtaaaaagaaaaatcataggtaataagtgtctaaagggtttcttcataggaacagtggttgttgaccccaaataggacaaataggactcccatgttcaagaacacatcaccgttgttaaaaaggtctgccattattaaatagtgcaatgaagaaccatttagactttattagagtccacgttattggcaaaagatgttggatattcatagaaaatcaaacttgacaaattccaaaagtgtctttcagctctggaacaaaagatgtcatatagttccttgctaccaaagagtttgttcatatggtaatagaggcccatacctttagagggcaaatccagtgctttaggaaggacttagatgatataaatggtatttgtcccttttctcatttttatttactgattttcaactcacttggcttttaatgaacattagcgttacttatctgttggcagctgggttggaaaacatttgtttttctagactttatgaaatggtagccactggtgttgcacttaatgtttattgccagttagttctctgcagttaatccacagcagaggaatcacacttctaaaatggttcattctcttcttcatagacatttaaagttgaacaaatactttcttgtatattgttactctgtttggatggagagggaatgtatatgtatcttaaaaatatttctctttgccacattaaacatgccttttttccttgtgtgtgtgtgtgtgtgttttcaggtcagatgtaccaacagtaccagcaacaggccggctatggtgcacagcagccgcaggctccacctcagcagcctcaacagtatggtattcagtattcagcaagctatagtcagcagactggacccccacaacctcagcagttccaggatatggccagc

SEQ ID NO: 314 - DNA, 2548 bp, Homo sapiens
  misc_feature: Incyte ID No: 1382961.12
  unsure 2494, 2502: a, t, c, g, or other
ggtgtgggctcagccacccccatccaatgacctgactactctcccttctcctcagatcctcacagccaccgtggacaatgccaacatcctgctacagattgacaatgcccgtctggctgctgatgacttccgcaccaagtttgagacagagcaggccctgcgcctgagtgtggaggccgacatcaatggcctgcgcagggtgctggatgagctgaccctggccagagccgacctggagatgcagattgagaacctcaaggaggagctggcctacctgaagaagaaccacgaggaggtgaggtggctggggcagaaggtcaaagatgctgaggagtgggtggcagagccctggggctgggcaatggctgaggccgtgggagagagcagagcaggtgcaccgggattagtcaccttagagggcttccctgtctgcagagccctgatccttggggtccagtgtgcagggcagactcctctttgtaccacactgcttctctgtacacaaggaacctcccaggggcctgcagaggctccctctacctaccctgcctccctcatgagggtgggggataagtaaggaaatcttgtcccatttcaaactctcaaagctgaacatctacatagaagcttggaaattagaggggaacttttgggggcataggcctaataattagattttattttggagagtccttggtctaatgggggagatagagtctgatggtggaggcaatactgagcagatgaataaaaatcatttagagggtcagatagagcagagggagaacaaaggaggggtccttgtgggaagtggggtccccttgtgggggaaggcttgggagtgagaggtcaggatgggtccagatgcgcacatccacatcccctttttccataggagatgaacgccctgcgaggccaggtgggtggtgagatcaatgtggagatggacgctgccccaggcgtggacctgagccgcatcctcaacgagatgcgtgaccagtatgagaagatggcagagaagaaccgcaaggatgccgaggattggttcttcagcaaggtggggggtgctgcaggccagagggctctcttaggggctggggctcaggggccttagcactgacagtaagcccacggccagatgtcttggaggtgcccctcctcagtaagctgcatggaccacagggtcacccactgcatcaacagacatggagctgagctcaagctgggatctggcgggtgggtggggaggtagggagctccctcagaataaaggcagagggtaaagaccttgggagtccccacgtctccctcaagaagtcaggaactagcatcaagagccaggctacatgttctggcttgttctcaagtttccggtctgtgcctcccacacgctgggattaaccataaaaagttaacatttcaaatggcatgtttctgggctttgggatgtgggaagctggtgagaaggcacactctctccacagttagatttgggaggaggcctgacttgggagagggatccaggctcacaccgccctgtcctgtgtcctgtctgcagacagaggaactgaaccgcgaggtggccaccaacagtgagctggtgcagagtggcaagagtgagatctcggagctccggcgcaccatgcaggccttggagatagagctgcagtcccagctcagcatgaaagcatccctggagggcaacctggcggagacagagaaccgctactgcgtgcagctgtcccagatccaggggctgattggcagcgtggaggagcagctggcccagcttcgctgcgagatggagcagcagaaccaggaatacaaaatcctgctggatgtgaagacgcggctggagcaggagattgccacctaccgccgcctgctggagggagaggatgcccacctgactcagtacaagaaagaaccggtgaccacccgtcaggtgcgtaccattgtggaagaggtccaggatggcaaggtcatctcctcccgcgagcaggcggcggtaggtggcaatctcctgctccagccgcgtcttcacatccagcaggattttgtattcctggttctgctgctccatctcgcagcgaagctgggccagctgctcctccacgctgccaatcagccccctggatctgggacagctgcacgcagtagcggttctctgtctccgcccaggttgccctccagggatgctttcatgctgagctgggactgcagctctatctccaaggcctgcatggtgcgccggagctccgagatctcactcttgccactctgcaccagctcactgttggtggccacctcgcggttcagttcctctgtcttgctgaagaaccaatcctcggcatccttgcggttcttctctgccatcttctcatactggtcacgcatctcgttgaggatgcggctcaggtccacgcctggggcagcgtccatctccacattgatctcaccacccacctggcctcgcagggcgttcatctcctanggaaaaangggatgtggatgtgcggatctggacccatcctgacctctcactccc

SEQ ID NO: 315 - DNA, 3053 bp, Homo sapiens
  misc_feature: Incyte ID No: 1359783CB1
ctagtattctactagaactggaagattgctctccgagttttgttttgttattttgtttaaaaaataaaaagcttgaggccaaggcaattcatattggctcacaggtatttttgctgtgctgtgcaaggaactctgctagctcaagattcacaatgttgaaagcccttttcctaactatgctgactctggcgctggtcaagtcacaggacaccgaagaaaccatcacgtacacgcaatgcactgacggatatgagtgggatcctgtgagacagcaatgcaaagatattgatgaatgtgacattgtcccagacgcttgtaaaggtggaatgaagtgtgtcaaccactatggaggatacctctgccttccgaaaacagcccagattattgtcaataatgaacagcctcagcaggaaacacaaccagcagaaggaacctcaggggcaaccaccggggttgtagctgccagcagcatggcaaccagtggagtgttgcccgggggtggttttgtggccagtgctgctgcagtcgcaggccctgaaatgcagactggccgaaataactttgtcatccggcggaacccagctgaccctcagcgcattccctccaacccttcccaccgtatccagtgtgcagcaggctacgagcaaagtgaacacaacgtgtgccaagacatagacgagtgcactgcagggacgcacaactgtagagcagaccaagtgtgcatcaatttacggggatcctttgcatgtcagtgccctcctggatatcagaagcgaggggagcagtgcgtagacatagatgaatgtaccatccctccatattgccaccaaagatgcgtgaatacaccaggctcattttattgccagtgcagtcctgggtttcaattggcagcaaacaactatacctgcgtagatataaatgaatgtgatgccagcaatcaatgtgctcagcagtgctacaacattcttggttcattcatctgtcagtgcaatcaaggatatgagctaagcagtgacaggctcaactgtgaagacattgatgaatgcagaacctcaagctacctgtgtcaatatcaatgtgtcaatgaacctgggaaattctcatgtatgtgcccccagggataccaagtggtgagaagtagaacatgtcaagatataaatgagtgtgagaccacaaatgaatgccgggaggatgaaatgtgttggaattatcatggcggcttccgttgttatccacgaaatccttgtcaagatccctacattctaacaccagagaaccgatgtgtttgcccagtctcaaatgccatgtgccgagaactgccccagtcaatagtctacaaatacatgagcatccgatctgataggtctgtgccatcagacatcttccagatacaggccacaactatttatgccaacaccatcaatacttttcggattaaatctggaaatgaaaatggagagttctacctacgacaaacaagtcctgtaagtgcaatgcttgtgctcgtgaagtcattatcaggaccaagagaacatatcgtggacctggagatgctgacagtcagcagtatagggaccttccgcacaagctctgtgttaagattgacaataatagtggggccattttcattttagtcttttctaagagtcaaccacaggcatttaagtcagccaaagaatattgttaccttaaagcactattttatttatagatatatctagtgcatctacatctctatactgatcagatcttgtgagacttattcactaccacaacaatagtatgggggaaactgcccccatgattcaaattatctccctcccacaacacgcgggaattatgggagtacaattcaagaggcgatttgggtggggacacagccaaaccatatcagtgtatatgtagcacattttctttgtggatgtggatccttgagggtggaggaaggagcaagggactgattattttgagttggtggtagagcctggtcgtcaggaaagaccacataggggtgcagcataaactatgacttcagagatggaaaggaattccccagatatgcaggtgaggaaggggacttgtggcaaggtccctgcatgtgtgaaggcatgggacaggagagactatcacttgtattgctcttgggtcttccctccccttccccccgcccttgcctctgtcccagggatccactggggctaaagggatgtcctggggcccagactgctagaggagccatgctacagggtctgttcagcacccccacctgactcctgacgcagagaggtggagaagctcatgggtcagcactgggcttggctgcccatctgaggcctgcaactgtggccagcatggaatgtctatgggaggccatcagctgggacatttagaactcttctgggaggggcgctcttgacccttctggagagcatgtggggaagcagaggagctgctcccctaagccaggaggagctggtgctgagttgtttattgggtgagagttgtgtccaacaccaatgatctttaaatgaactgagtcctagagctgtccggaagactagaactaggaccccggttggagactgcagggagtgcttatagttgacatcggacagggcagctccgttaggaaggagtgtcacctgcactgggaaggttccaaggaagaggttgcctgccttagagaccaagtaccctgataggccagcatcaggctggcctagtacaaagatggtctcgaagcgcccccagggaaatgtgcctccaacaaatcgaagtggataaaaagggcaggacactctaatgagcaccgggcactctctagacatctttttcagattccccctcgctatgaggcaggtctgtctccatcttgcagatgagaatctcagtgaggaggttcaggatcacacagccagtacaggactctggtgccgcgccgtctctaaagcccaccgttcaaccactcgcctgtgctctcagagaggtcggtggaacctgcgggatttctggaaggggagcctgagagagcttcagaagggcgaagactgtca

SEQ ID NO: 316 - DNA, 872 bp, Homo sapiens
  misc_feature: Incyte ID No: 1796035CB1
tgctcctcccacccttttcctcttggaagccaaacccctttgtaatctgtataaggtccacaccccgggagctgagtgattgcagaaactggccttccatctctctcagacaccaagctgcagatccaggcttttctgggaaagtgaggccaccatggctctggagaagtctcttgtccggctccttctgcttgtcctgatactgctggtgctgggctgggtccagccttccctgggcaaggaatcccgggccaagaaattccagcggcagcatatggactcagacagttcccccagcagcagctccacctactgtaaccaaatgatgaggcgccggaatatgacacaggggcggtgcaaaccagtgaacacctttgtgcacgagcccctggtagatgtccagaatgtctgtttccaggaaaaggtcacctgcaagaacgggcagggcaactgctacaagagcaactccagcatgcacatcacagactgccgcctgacaaacggctccaggtaccccaactgtgcataccggaccagcccgaaggagagacacatcattgtggcctgtgaagggagcccatatgtgccagtccactttgatgcttctgtggaggactctacctaaggtcagagcagcgagataccccacctccctcaacctcatcctctccacagctgcctcttccctcttccttccctgctgtgaaagaagtaactacagttagggctcctattcaacacacacatgcttccctttcctgagtcccatccctgcgtgattttgggggtgaagagtgggttgtgaggtgggccccatgttaacccctccactctttctttcaataaaacgcagttgcaaacaaaaaaaaaaa

SEQ ID NO: 317 - DNA, 791 bp, Homo sapiens
  misc_feature: Incyte ID No: 444850.11
atgagaatgagaatgaggattcagctgactttgtgagcttcttcccagattttgtgtggacactgagagatttctccctggacttggaagcagatggacaacccctcacaccagatgagtacctggagtattccctgaagctaacgcaaggtaccagtcaaaaagataaaaattttaatctgccccgactctgtatccggaagttcttcccaaagaaaaaatgttttgtcttcgatctgcccattcaccgcaggaagcttgcccagcttgagaaactacaagatgaagagctggaccctgaatttgtgcaacaagtagcagacttctgttcctacatctttagcaattccaaaactaaaactctttcaggaggcatcaaggtcaatgggcctcgctgaagagattctgcagacatacttgaaatccaaggagtctatgaccgatgcaattctacagacagaccagattctcacagaaaaggaaaaggagattgaagtggaatgtgtaaaagctgaatctgcacaggcttcagcaaaaatggtggaggaaatgcaaataaagtatcagcagatgatggaagagaaagagaagagttatcaagaacatgtgaaacaattgactgagaagatggagagggagagggcccagttgctggaagagcaagagaagaccctcactagtaaacttcaggtatccaaatgcatcaccttgtggttcgtttttctttttctctctgttcttcctgatcacaaacttagtatggcagagcgaacataaagcccaggggaagg

SEQ ID NO: 318 - DNA, 1192 bp, Homo sapiens
  misc_feature: Incyte ID No: 236062CB1
gtgagccggagtcagaactgcgtctcgcgacccaggcgcgggtttccggaggacagccaacaagcgatgctgccgccgccgtttcctgattggttgtgggtggctacctcttcgttctgattggccgctagtgagcaagatgctgagcaagggtctgaagcggaaacgggaggaggaggaggagaaggaacctctggcagtcgactcctggtggctagatcctggccacgcagcggtggcacaggcacccccggccgtggcctctagctccctctttgacctctcagtgctcaagctccaccacagcctgcagcagagtgagccggacctgcggcacctggtgctggtcgtgaacactctgcggcgcatccaggcgtccatggcacccgcggctgccctgccacctgtgcctagcccacctgcagcccccagtgtggctgacaacttactggcaagctcggacgctgccctttcagcctccatggccagcctcctggaggacctcagccacattgagggcctgagtcaggctccccaacccttggcagacgaggggccaccaggccgtagcatcgggggagcagcgcccagcctgggtgccttggacctgctgggcccagccactggctgtctactggacgatgggcttgagggcctgtttgaggatattgacacctctatgtatgacaatgaactttgggcaccagcctctgagggcctcaaaccaggccctgaggatgggccgggcaaggaggaagctccggagctggacgaggccgaattggactacctcatggatgtgctggtgggcacacaggcactggagcgaccgccggggccagggcgctgagccctcgtgctggaatggttgtctggtatctgaactgagcctgctggctggaccaactgtcctcgaaaagacacagctggcttccctagtacagagaacagggcttgggccactttggagagacagaatctagtcctgggcaacttcacatccgtcctcctgtctcagggctggcagggggagcctggaattaccccctagtgatggaatgacagggtctggtggggactgaattccctggccctggggtcatagcttgggctgttccttctctgatacgggaagagaccccaatcagatttttcaaattaaagccagtcctgggaaatctcaaaaaaaaaa

SEQ ID NO: 319 - DNA, 3145 bp, Homo sapiens
  misc_feature: Incyte ID No: 333238.12
gttgaagactatgacatagtaaatagctctgggtggcttgaaacgaaagtttaactttgcggacaaacaggacttattgtagggggtggtcaaaatagtcccggcggggcggggccatgacccctgacgtcgcggtccggcgcgcagttcagtttggcggttccggtaccgctctcacattggggcgggatgtgggagcggctgaactgcgcagcagaggacttttattctcgtctccttcagaaatttaatgaagaaaagaaaggaatccgtaaagacccatttctctatgaggctgatgtccaagtgcagttgatcagcaaaggccaaccaaaccctttgaaaaatattctaaatgaaaatgacatagtattcatagtggaaaaagtgcctttagaaaaggaagaaacaagtcatattgaagaacttcaatctgaagaaactgccatatctgatttctctactggcgaaaatgttggaccacttgctttaccagttgggaaggcaaggcagttaattggactttacaccatggctcacaatcctaatatgacccatttgaagattgatctgccagttactgcccttcctcccctttgggtaagatgtgacagttcagatcctgaaggtacttgttggctaggagctgagcttatcacaacaaacaacagcattacaggaattgtcttatatgtggtcagttgtaaagctgataaaaattattctgtaaatcttgaaaacctaaaaaatttacacaagaaaagacatcacttgtctactgtaacatccaaaggctttgcccagtatgagctctttaagtcctctgccttggatgatacaatcacagcatcacaaactgcgatcgctttggatatttcctggagtcctgtggatgagattcttcaaatccctccactctcttcaactgcaactctgaatattaaagtggaatcaggagagcccagaggtcctttgaatcatctctacagagaactgaaatttcttcttgttttggctgatggtttgaggactggtgtcactgaatggctcgagcccctggaagcaaaatctgctgttgaactcgttcaggaatttctgaatgacttaaataagctggatggatttggtgattctacaaaaaaagacactgaggttgagaccttgaagcatgacactgctgcagtcgatcgttccgtcaagcgtcttttcaaagttcggagtgatcttgattttgctgagcaactgtggtgcaaaatgagcagtagtgtgatttcataccaagacttggtgaagtgtttcacattgatcatccagagtctacaacgtggtgatatacagccatggctccatagtggaagtaacagtttactaagtaagctcattcatcagtcttatcatggaaccatggacacagtttctctcagtgggactattccagttcaaatgcttttggaaattggtttggacaaactaaagaaagattatatcagttttttcataggtcaggaacttgcatctttgaatcatttggaatacttcattgctccatcagtagatatacaagaacaggtttatcgtgtccaaaaactccaccatattctagaaatattagtcagttgcatgcctttcattaaatctcaacatgaactcctcttttctttaacacagatctgcataaagtattacaaacaaaatcctcttgatgagcaacacatttttcagctgccagtcagaccaactgctgtaaagaacttatatcaaagtgagaagccacagaaatggagagtggaaatatatagtggtcaaaagaagattaagacagtttggcaactgagtgacagctcacccatagaccatctgaattttcacaaacctgatttttcggaattaacactaaacggtagcctggaagaaaggatattctttactaacatggttacctgcagccaggtgcatttcaagtgaagtgtgctgatgaagtcctctataagcacaagccaaaaagagaaagagaaaaaaaggtaattattgtagaacctgaaaacagcaatgtatggaaaccctcaaagcagaaaagggaggaagatcctgaagattctcttatgaagctccaaaattgataatcctgtctcagctctgcctcctcaggaggagcattagtagaacagcagtgatgaggacacagagggagcagacagtgggtaccacgatctccgtaaccatttgcatgtgacttagcaagggctctgaaatgacaaagagaacgagcaccacaaatgagaacaggatcattttagtaaatacagctttatcccaaaagctttaactgtattgggaaaacttaaaaaatagcatcctcaaattttctgattcttatttgccatgaaatagaacttagtaaattaaatgttatttgaaaatgttataagagctttgtaaatatttcagaaaatatgggataaatgcctgaatttggttcttctacaggtgctataataaagtccatctctcaatacttatactttctaaattcatctcagaatattagcagccatattccacagttcctataatttttactgggggggatttgtgataggaaagtccttgggaaacatttccaatctttcaaaatattattgtgtatcttaagaagtataggaacttgtatgttgaaatgttgtatggtagttcttgtatagttaaataataatctttttaagagttaatgataagcatatgttatgtgcattattaataaaatagtggccacttaggtaatacccacttttatcttgtgtgctgggtactctggttactgagataaataaggcactggacatcctcacgtggagttcacaggctcatcagtgaattctgtaccacatttcaaccttgtttattttagtttaatggaatatacattcttagtattgcctgattatttaaatttgttgagggggattgcatgttgctttattggcctgtaaaaatagctagtttggtaagatttggtctcgcaccttccatctttgctaccacattaaagatgagcttgttaaaaaggaaagcatatttctctgattgcccttatggagaaataaagataaaattcaaagaaacaaaaaagaaaaaaaaggggccg

SEQ ID NO: 320 - DNA, 3082 bp, Homo sapiens
  misc_feature: Incyte ID No: 475547.2
cgcggatgctgtgcttcctgaggggaatggctttcgtccccttcctcttggtgacctggtcgtcagccgccttcattatctcctacgtggtcgccgtgctctccgggcacgtcaaccccttcctcccgtatatcagtgatacgggaacaacacctccagagagtggtatttttggatttatgataaacttctctgcatttcttggtgcagccacgatgtatacaagatacaaaatagtacagaagcaaaatcaaacctgctatttcagcactcctgtttttaacttggtgtctttagtgcttggattggtgggatgtttcggaatgggcattgtcgccaattttcaggagttagctgtgccagtggttcatgacgggggcgctcttttggcctttgtctgtggtgtcgtgtacacgctcctacagtccatcatctcttacaaatcatgtccccagtggaacagtctctcgacatgccacatacggatggtcatctctgccgtttcttgcgcagctgtcatccccatgattgtctgtgcttcactaatttccataaccaagctggagtggaatccaagagaaaaggattatgtatatcacgtagtgagtgcgatctgtgaatggacagtggcctttggttttattttctacttcctaactttcatccaagatttccagagtgtcaccctaaggatatccacagaaatcaatggtgatatttgaagaaagaagaattcagtctcactcagtgaatgtcgcaggccatttctaaaagtgctacagaggacagacagggttttgaggccaccctgattattgggatgcatctgcagcacatccaggacttgaatttcattacgagttcctaatagttgtatttctaaagatgtgtttcctagagaatgtacagccttatgacactgtagtgatgtttttataattttctaagtagatttttttatattaacaaattcatatacagaaaaaataaggtgttacaaaaaatggagagctcttatttttgtacagattctgtcgtttttgttttatttgtgtgagatttatggaaatacactaaatgagtaattcaggttcagtacatttattacaaagtgaaatcaggggatattcatttgtaaattttattcttagtgaatgaactgtataattttttttatcaggagagcacttataaaattcaatttataaagatcatatacccaaatcataaagatttagttgatacattaacactaagatactctgatttttagccgaactaaacaaagtgcttctactgagaggcctttataccaccatgtacagtaactctaagtgaatacggaagaccttggttttgaaattctgccaccttgtttctccctgctcatgaggtcgcaccttttgctcttgctgctaattgcccattcgtagtgggtgtaatgccaggtggaatggtttcaacaagtcaggtgaaaaccatcctttattgttgctggcacaacttgatatatagtctgactcagaactgaagctcacatctcaaattcatttcatgccagtaaatgtggcaaagagaagaaaggcccaagagcgagacaagaagaatggagaagggggcagccaagaagaacttctgggttcagggtactgtttatttgctccttctcttcatgcctgtggctggatgtcccacaacactataagaaatataagtcaagccctttgtgttaagcaagaactacagactccatcttttcacccaaatcatgaatgaccaataaaaagcaagttattccagaggaagaagcagcccttgaaatgttaaggcttaggcttgaaaggtgaagagcaggaattctctctttcaaatcctagagcataaacccatgtgtggccaagtgagatcagccctcaagggcacatgccaagggcagagcagcccatgtagacagcttcggagggcatgggggtgtagggagttcggggtagctcctcattaactatttgttgggtgagtaaaggggtgaggctcagtggcaggtacctctgcaatgacaagctgcctcccctctatgtgtttagcatatgttattagaacatgtccgacacccctaccgctgccatttgggccctttaataaagccaagtagagaaatctggcaataaaaggcaaatgtaagcatgctttctttaagacgcatcataaatggttttctttaagtgaatggaagagtttgacagagatacacctttgtaagaaaacattaagaatgctggctggctgtggtggctcacacctgtattcccagcactttgggaggcctaggcaggaggattgcttgagcctgggacttcgagaccagactgggaaacatggcaaaatcccatctctacaacaaaaatacaaaaattagccaagtgcggtggtgtgcctgtagtcctagttacttgggaggctgaggtgggagaatcacctgagcccaggaggtggaggctgcagtgagccatgccaatgcactccagtctgggcaacagagtgagaccctgtctcaaaaataaataaataaataatgaataaagagaatgctaatcatttctgggttcactgcgactcactgtagtgctggggatcccccttgtaacactggaactgaaagacagtgatgaaagctatgtcaagcattcattattctgaagaggaggagaaatgccacatacctttcccatgggacctgtggtggaatgaatccatacttctgcctcacttcgagcagacttttgttctcggcgctcctcacgatggagtttcatgcttcattttcacatctctctgcacaattagattgggagctccttgagggcagagtacgtgccttaatctttatctttgtaatgccacaatgaacagagtgcctcctggtacactgtaggagcttaagaaatactcactgaatgcatgaatgaatgaatgaacaaatgaaggaatgactaaggatgtttgtagtgctataatatagaatgggatttactctgctttaccagttagtttcataataaacaaatagtctgtatcgcctggt

SEQ ID NO: 321 - DNA, 2730 bp, Homo sapiens
  misc_feature: Incyte ID No: 977929.1
  unsure 2714: a, t, c, g, or other
cacacatggagatatagaattgaaattgctctgctttctttacaaatgactcagagtgtgcttgtccttccctaaaatgttgccagcatgtaaaggattttcaatgagcagtgcaataagccagcaactgggaaggcttggagcggcactgatataacgtggtgctgtcacacagataatcagggctggagccaagtctcggtagcgctgtgcattatcctggtcacatactggaagttttgtttatccaacttggttgctcttgaagctggtgagagccctgccaggatgtggagtggacttcctagcagaggcagtacatgccacactactacccttcctgctcttgtgcgcacacctaccctgatgatgcagccttcactggatatcaaaccatttatgtcttttccagtggacagtagttctgctgttgggctctttccaaattttaacacaatggatcctgtgcaaaaagcggttattaaccatacatttggagtatccattcccccaaagaagaaacaagttatttcttgtaatgtctgtcagcttcgctttaactcagatagccaggccgaggcccactacaaaggaagtaaacatgccaagaaggtcaaagcactagacgcaacgaaaaataaacccaaaatggttccttccaaggacagcgcaaaggctaatcccagctgctccatcactccaatcacaggcaacaactctgacaaatcagaagataaagggaagttaaaagccagcagttccagtcagccatcaagctctgaaagtggctcatttctcctcaaatctggcacaacacccctgccacctggagcagccacttctccctccaagagcacaaatggagctcccggtactgttgttgaatcagaagaagaaaaagccaaaaaattactttattgttcactatgcaaagtggctgtgaactccctgtcacagctagaggcacacaacacaggatctaaacacaagaccatggttgaagctcgtaatggggctggtccaattaaatcctatcctagacctggatcaagattaaagatgcagaatgcagtaaggggtcaggactacaagacaagacatttcattgtgaaatctgtgatgttcatggtaattcagaaattcaactcgaacagcacatttctagccgaaggcataaagatcgagttgcagggaaaccactgaagccaaaatacagcccttacaacaaactccagcggagcccgagtattctagcagcaaaacttgcattccagaaagatatgatgaagcctttggccccagccttcctgtcctcacctctcgcagcggcggcagccgtgtcctcagcgctgtcactcccaccccggccctctgcctcgctcttccaggctccagccattcctccagctcttctgaggcctgggcatgggcccatccgcgccactcctgcctccatcctctttgctccgtactaacgtctgcaaaccccaagacgtttgaggccagtaggaagttgagaaagaaagccacaaggattcagcaatttaagcagtttgtgttgcagtacccccattcacccacaaaatgcagcccaccacccagtcccccaattccagagagaaacacatcactagattgacgagggcttttagagactgctcctataattgaggaatcagcagcataggctttatctccctacttcctcccccaccctaccgcgttcaatttgtgtatctcagatatttgatttcttgagcatgtattggtcagaaagaaaaagaaagaaaaccattctctatttttccatgggtatgatctggcttaaaacaatatggaatattttcctgacagacttgaaaactaggatcttcctcagatgtctgtaaataactctggtatccaactgggtgtattctagtgtggaacaaaaaacagtgaacacaagtgcttacttgtggatactatcttaccaacggatcacaaagttctctttttggtgtactgttgttgacagggattgtgtactgtttcgacccaagtactgctgtatcctgtgtagtactagatctgtatctcttgtctgaattaaacatttttagttgctgtgtaaatgttaggaagcaaagtagctttgaattttctctgtaagagaataaaagataaaataatgtattttctttatttcacattttatttggagatatttaaatgaaatagaaagccatataacatagctataattactacctgtttgctatttttgtttaacttattttgtagcttcctcactggtttgtgttgctaagcaaacgtatacaaacagaaaaagagcttcctaaattgcacatttttgcacctcttgtgcattctgcaagaagacaatgaatccatgtatttctatataagtatcttcttcatttttaacctgttttcatttgtaatgatgctacataattttgtggctccctaatgcaataatgtacagaagataaaaaaatttataattgaacaatttgtctttctgttcgctgaatatattgcaggtcatgctcccatgcccccctttctaagccgatatcaacaagactggaatgtttgtgatatcaggggcaagagttatcatagaacaacaaaatagagtggactcttttagagcatctatatctgcaacctgtaaatggtaaaatgtctgtgtatttttttaaatgtancttttcaataaaagta

SEQ ID NO: 322 - DNA, 1627 bp, Homo sapiens
  misc_feature: Incyte ID No: 1362715CB1
ccagctgttccctccgcggattctccggggctggttcatcacctccgaatattcctgtgacaggagacgcttgcaaaacccgcctccagcctccagcagcaaataaatagaaggcttgcagcccagaaggagccagaagaagtttctaggcgcgcgtgccctgggtttattaagctcctggctccgctctagacctcagcggttctggctgccagcctgggcagcctgggaagcctgggaggacggtggcttgccggtctgtcgtgaggcagtgcggacggggaccctctgggattctgctggatctgccccgggggttacctttgggggctgggaccccagtcgaggggacacaaccgtccctggcagtggttggttctgcttctccctgcagaaaagcagcattttcggaagctgaagaataagctagcccagccacaccaccttgttgtgtgaccttgggcaggtggttctgtctctctgagcctctgtttctctctgagctgagcagccaccatggctgacggtcagatgcccttctcctgccactacccaagccgcctgcgccgagaccccttccgggactctcccctctcctctcgcctgctggatgatggctttggcatggaccccttcccagacgacttgacagcctcttggcccgactgggctctgcctcgtctctcctccgcctggccaggcaccctaaggtcgggcatggtgccccggggccccactgccaccgccaggtttggggtgcctgccgagggcaggacccccccacccttccctggggagccctggaaagtgtgtgtgaatgtgcacagcttcaagccagaggagttgatggtgaagaccaaagatggatacgtggaggtgtctggcaaacatgaagagaaacagcaagaaggtggcattgtttctaagaacttcacaaagaaaatccagcttcctgcagaggtggatcctgtgacagtatttgcctcactttccccagagggtctgctgatcatcgaagctccccaggtccctccttactcaacatttggagagagcagtttcaacaacgagcttccccaggacagccaggaagtcacctgtacctgagatgccggtactggcccatccttgttttgtccccaaccctagggcttctctgattccaggatacattactttagctgaactcagatttagtgcaagtaaaatgttagagggtgcgggggtgaggactgaccacagattccctggatagtgtagtggtagatttctccacaggatagcgcaattggcaaatcatgcttggttgtgttaggccaaaatactagttttgctttctttaccttttctatcttgatgaaaatgttgcacattctatagttgcaaaacacataaaaggggacttaacatttcacgttgtatcttacttgcagtgaatgcaagggttacttttctctggggacctcccccatcacccaggttcctactctgggctcccgattcccatggctcccaaaccatgccgcatggtttggttaatgaaacccagtagctaaccccactgtgcttccacatgcctggcctaaaatgggtgatatacaggtcttatatccccatatggaattgc

SEQ ID NO: 323 - DNA, 650 bp, Homo sapiens
  misc_feature: Incyte ID No: 3117642CB1
agctgtgagagtgtgcagtcgcgttcctgctgtccggacacttttttcctctactgagactcatctggtagatccgcaggccagtcctcccaggggctgaagttgtgaaatatgggttttctaagaagattaatctatcggcgtagaccaatgatctatgtagaatcttctgaggagtccagtgatgagcaacctgacgaagtggaatcaccaactcaaagtcaggattctacacctgctgaagagagagaggatgagggagcatctgcagctcaagggcaggagcctgaagctgatagccaggaactggttcagccaaagactgggtgtgagcttggagatggtcctgataccaagagggtgtgcctgcgaaatgaagagcagatgaaactgcccgcagaagggccagagcctgaagcggatagccaggaacaggttcacccgaagactgggtgtgagcgcggagatggtcctgatgtccaggagttgggcctgccaaatccagaggaggtgaaaacacctgaggaagatgaagggcaatcacagccttaaaagaagacacgctgaaatggttcaggctgctcctgtgttggaaatttgaccattaaaattctcccaataaagctttacagccttctgcaaaaaaaaaa

SEQ ID NO: 324 - DNA, 1550 bp, Homo sapiens
  misc_feature: Incyte ID No: 2026270CB1
cggctcgaggtgcatttacatgacagcaaggcctaagcaaacatttagcttctattggcacttgttctatttctaaaccttagaaaaaagaacaacaaaaaatatttctggaaaagactgctgagaagatttccctctttcagccagaagagcagagagaagattgtaaatcaaggaaaagatttcccccttcagatctaacgattacattagggctcctgcatctttttggaaggattctttttataaatcagaaagtgttcgaggttcaaaggtttgcctcggagcgtgtgaacattcctccgctcggttttcaactcgcctccaacctgcgccgcccggccagcatgtctccccgcccgtgaagcgggggctgccgcctccctgccgctccggctgccactaacgacccgccctcgccgccacctggccctcctgatcgacgacacacgcacttgaaacttgttctcagggtgtgtggaatcaactttccggaagcaaccagcccaccagaggaggtcccgagcgcgagcggagacgatgcagcggagactggttcagcagtggagcgtcgcggtgttcctgctgagctacgcggtgccctcctgcgggcgctcggtggagggtctcagccgccgcctcaaaagagctgtgtctgaacatcagctcctccatgacaaggggaagtccatccaagatttacggcgacgattcttccttcaccatctgatcgcagaaatccacacagctgaaatcagagctacctcggaggtgtcccctaactccaagccctctcccaacacaaagaaccaccccgtccgatttgggtctgatgatgagggcagatacctaactcaggaaactaacaaggtggagacgtacaaagagcagccgctcaagacacctgggaagaaaaagaaaggcaagcccgggaaacgcaaggagcaggaaaagaaaaaacggcgaactcgctctgcctggttagactctggagtgactgggagtgggctagaaggggaccacctgtctgacacctccacaacgtcgctggagctcgattcacggaggcattgaaattttcagcagagaccttccaaggacatattgcaggattctgtaatagtgaacatatggaaagtattagaaatatttattgtctgtaaatactgtaaatgcattggaataaaactgtctcccccattgctctatgaaactgcacattggtcattgtgaatatttttttttttgccaaggctaatccaattattattatcacatttaccataatttattttgtccattgatgtatttattttgtaaatgtatcttggtgctgctgaatttctatattttttgtaacataatgcactttagatatacatatcaagtatgttgataaatgacacaatgaagtgtctctattttgtggttgattttaatgaatgcctaaatataattatccaaattgattttcctttgtgcatgtaaaaataacagtattttaaatttgtaaagaatgtctaataaaatataatctaattacatcatga

SEQ ID NO: 325 - DNA, 433 bp, Homo sapiens
  misc_feature: Incyte ID No: 981662.2
gttacacaagaatttaagatcgatgaagaattggtaacaaattctgggaagttcttgattttggatcgaatgctgccagaactaaaaaaaagaggtcacaaggtgctgcttttttcacaaatgacaagcatgttggacattttgatggattactgccatctcagagatttcaacttcagcaggcttgatgggtccatgtcttactcagagagagaaaaaaacatgcacagcttcaacacggatccagaggtgtttatcttcttaaacccccagtcggatcttcaggcccaggatagatgtcatagaattggtcagacaaagccagttgttgtttatcgccttgttacagcaaatactatcgatcagaaaattgtggaaagagcagctgctaaaaaggaaactgggaaagttgatcatccataaaaatcatttc

SEQ ID NO: 326 - DNA, 1437 bp, Homo sapiens
  misc_feature: Incyte ID No: 453004.10
tgaagacacacgggttcacactggagtcctgccgtagcatgattgcgctcatggatacagatggctctggaaagctcaacctgcaggagttccaccacctctggaacaagattaaggcctggcaggtgggaagagaaaatgaagcgtgggagtcaagaatggggttgatttggagattcagtgtgtgacctccatcctcaaattttctattgccagaaaattttcaaacactatgacacagaccagtccggcaccatcaacagctacgagatgcgaaatgcagtcaacgacgcaggattccacctcaacaaccagctctatgacatcattaccatgcggtacgcagacaaacacatgaacatcgactttgacagtttcatctgctgcttcgttaggctggagggcatgttcagagcttttcatgcatttgacaaggatggagatggtatcatcaagctcaacgttctggaggtaaagcataggcacagcacattccccctacacattaaaactcaaggtggaggggtcaacggggcggactggacccagggtgtgctcctcatttccacacagtggtggagggaagggataggaacagaacatggagggaggctcagcaggctcccaggacacatgcacttgaggcccaaaaggacctctgttcccccagtcacttgatgcgggaaaacatgcaccttcttagggaagatctaggagaaagggaacagtaagccactgcttcttggaaaatcttctgggggtctgacctgctgggactgttccctttcctcttgccccgtaagattcctagggcggggggggggggtcactcttttctgatctacattctgatcttgggacttctttcagtggctgcagctcaccatgtatgcctgaaccaggctggcctcatccaaagccatgcaggatcactcaggatttcagtttcaccctctatttccaaagccatttacctcaaaggacccagcagctacacccctacaggcttccaggcacctcatcagtcatgttcctcctccattttaccccctacccatccttgatcggtcatgcctagcctgaccctttagtaaagcaatgaggtaggaagaacaaacccttgtccctttgccatgtggaggaaagtgcctgcctctggtccgagccgcctcggttctgaagcgagtgctcctgcttaccttgctctaggctgtctgcagaagcacctgccggtggcactcagcacctccttgtgctagagccctccatcaccttcacgctgtcccaccatgggccaggaaccaaaccagcactgggttctactgctgtggggtaaactaactcagtggaatagggctggttactttgggctgtccaactcataagtttggctgcattttgaaaaaagctgatctaaataaaggcatgtgtatggct

SEQ ID NO: 327 - DNA, 2424 bp, Homo sapiens
  misc_feature: Incyte ID No: 978147.7
gaaatagcaaatttctatgaagtttactctttcaagattgtgaaaaagagcaagacaacaaaacaaaagatccaacccatgatgttaaaacccccaatacagaaacgaggacaagttgcttaattaaatataatgtgtctactacgccacactttgcaagtatggcgtagtagacacattatatttaattaagcaacttgcaaagtgtgaaaaaaaaggtgcagtttgatggaacaaattccgcatttaaagagctgaagtttttaacaccagtgagacgttctcgacgtcttcaagagaaaacttctaaattgccagatatgttaaaagatcattatccttgtgtgtcttcattggaacagctaacggagttgggaagagaaactgatgcttttgtatgccgccctaatgcagcactgtgccgggtgtactatgaggctgatacaacataagagaaataaagctctgttagggaatggggtttttattatttgtggggtgttttgttttgagtagctttatattgctcttaggtctggagttggccatgtacctatgtatcctaagcattcacggcagtgagctcctttactaacattcatgttatggcaagagttgtcctctacattggaaagctaatcctaccttgtcagtttcaaccaactgagttttttctttaagaaaggtaaattttgtcagctagtttactatgttccttgaatataaacaggttataatactaccctgttcactttactaaatataagtacagtaatgatgcataattagaaaatgaggtattctaggtaaaatgtatgtttgccttgacatgtttttaaaagttatgatgtacctccctgcctttaaacagaatacttttttcttttttttggcctttctcagattagtcaaaaattctatagaatgactcacttcgaatactaagacacaggaggtttagcctgctttcttaccaaattcatgttacccagacttgtgttctcttgcgtcccttggactgcctgttgattgatggaaagtgtctgcactgacacttttcgtcagtagtctgtagtttcgtggcctcttttgattataactggggtcaccaagaaggtttacttaattaaataccgcatttctaagagaagatactttgtgtaagaaaagatgccacatttagtggtttaacttttgtaacttcacttgatagtttttaagcaattagaatggagttagggaaagaacatatcatactgaacaaatgtcattctagtttagatagcatttctaagataactgatactaatacttgttttcttccctataacataaaaaacttcactgttaagtcatgtcccttgaaacatgatagttacatacacagttttctctccacacataaataacaccactaaagttgttttgtaaggttccaaactaatatggcatatatcaactctacagtttcaaataaatgactttttaattgtaaaagattagttgaaaaactgtatgaatgtgaagatcacatgcttagtcatttttatgttcattccactttgtatatcttttctatttattgacttctcatgttctagagagtaggacttttattccgtgtacctgatatatatacaattaaaatatctgtataattatgttttaatgaagtttatttcaacagatattttatgaaatgcagtttaaccacagtgaatgaattttagctttgcttttgaaatacattgtaagatttgacttgaggtttttgacacttaagtacatgcttaatgatatattttcaaaagtcatcagtctacttacataaactttacctaatttttttcactttaacaaaaacataactatgcccttgttttttcatactttgacccaaaatatgccattttgaaataaaatttaagctttgaacagctacccatacacttgacccaaattatagcttcagtgattaagtgagatctgtatatgccacttcctgacactgaggaactgagcaagttacagcttctgtaatatagtcttaatctcaaaatagcagactccttttcacaggagtatgcagagtgccctgtaaactctagcttgtctaagccaacaggatgcttccgcactgcttcacatttgcctaaaagccttcttttaccctccacagtcaaaagaagaagactgaagggcaccagtattatctccttctataaaaagccttgaggaaataagttaaatctcctagagaaaggttacacttcaggaagacattgactgagaaggcacagccattcgataactggtatgaagtgaagctccaaactaaaagagctaaaacttgactagacatcccaaggaatatgagtagtagcaagcatgcatgcaggatcctaaagtaattaggaaaaaaat

SEQ ID NO: 328 - DNA, 1320 bp, Homo sapiens
  misc_feature: Incyte ID No: 2132626CB1
gcgtgacccagctgcggccggccagccatggagactggagcgctgcggcgcccgcaacttctcccgttgctgctgctgctctgcggtgggtgtcccagagcaggcggctgcaacgagacaggcatgttggagaggctgcccctgtgtgggaaggctttcgcagacatgatgggcaaggtggacgtctggaagtggtgcaacctgtccgagttcatcgtgtactatgagagtttcaccaactgcaccgagatggaggccaatgtcgtgggctgctactggcccaaccccctggcccagggcttcatcaccggcatccacaggcagttcttctccaactgcaccgtggacagggtccacttggaggaccccccagacgaggttctcatcccgctgatcgttatacccgtcgttctgactgtcgccatggctggcctggtggtgtggcgcagcaaacgcaccgacacgctgctgtgagggtcccggtgagatggagtgggtcacacctggcaagctggaagaaagttccctggggatgggagagcgggtgggtgctgccaatctccagctactgtggccacaccccacctggtcatgggcagacccctcccttcctgggctgacctgctccctcgaggccagcctgctccctggctgaggctcaggctatccgcccaagctctttgctcattctagggccagtggaggaaaatgtgataaggccagagcttgtgtgctgggcacagaaatcacctgctgcatcctgtgctccgcaggctgggccggagcctctgcccgcaggtttctatgctgtttcttagcacagaatccagcctagccttagccgcagtctaggccctgcttggactaggactccttgcttgaccccatctctggttcctgccctggctcctgcaccagccccagctcctgcctacatccaggcagaaagataggcaggggctcttggaagacgttccgtgctgtgacctccgagccctcctggtgggaagacagctggaaaggctgggaggagaagggaggggttgggggttcccaggagccatgcgtggcctgcagagtccattccatcatgatgctgtgcccgctatgggctgtgtccatgaccagaggctggagtgggggtgtgttagagcccctcaccgggacttgctgtgcggatggggcctgggcctccttcctacaggggctcctctgtgggtgaggggccctctggaatggcatcccatgagcttgtggcctctatctgctaccatctgtgttttatctgagtaaagttaccttacttctggaaaaaaaaaa

SEQ ID NO: 329 - DNA, 1677 bp, Homo sapiens
  misc_feature: Incyte ID No: 402716.37
ctccagctcatcttctcggaactgagcaggaacttctcaactgtggggttgcgtgcccggggagctgccctcgccagggaaggtgcgcagcgggacttcggggaagccaggtgacaagggaaatggcgatgcctcccccgacggcaggaggagggtgcaccggtgccactttaacggctgcaggaaagtttacaccaaaagctcccacttgaaagcacaccagcggacgcacacaggagaaaagccttacagatgctcatgggaagggtgtgagtggcgttttgcaagaagtgatgagttaaccaggcacttccgaaagcacaccggggccaagccttttaaatgctcccactgtgacaggtacgtgcctgaggacaatgctgggcaaggagcgtggggccttgggaatgtgatgaccagggttgagtaggtgtgcagggcacattcgaaggaaggcatgcagtttcctatgtgtgaacatttcttttcaagcctgggactttttagaaagtttctggtgtgctcattgtccatggttaggaagaactgttccacatacacctgacattggagtcagtttattgatatgtttggagattggcctttcaacagttttcatatttgaagaattagaaatgaagtccgttcagattctccaaagaacctccagccactggtgggggacattcttaattcacattcctatcagttggtatctcctgtccctgaagacactgatgaggcttgggaggagaatcccacctttccctgcagggggttaggctgggcagggcagggaggtgagggcgctggtccagaacactggcaagggatgggaacctaacttcttctgtgcttctgatttgcccttgcaggtgtttttccaggtctgaccacctggccctgcacatgaagaggcacctctgagggagcagagaggtggatcctgtaggctaaaaggcttccaggctgagagccggccgtggaaggagggatgcgtgttccagccaaagcatgccgttctgcaccctacccagttgcctccagggcctctccttggaaggtcttttgagggctaaaaaggtcctgtaagaagcggcatagcacccgtggtgcatggtatgtgggtgaccctggactcgccactggtacccgcccttccgagcggcgcctaagcctttgccgtgagcatgcacactgagaatgctaatggttgggttgattgtatgttgaggatctattactgaccgtatgatgaggccaactttttttccttgtggttagcaagactgcaagagatggaaaaaaagtagtttgaatgttttgtgtgtaaggagtataccatgagatgagatgaccaccaatcatttccttggggggagggggtgtctgcaccttagaaaaaaaaagaaaaatcaaaaaaacaaaaaaacaaaaacaaaaaaagaaggaaaatcttggagggtgggcgtgggaactcaggaccccagagtggcgagtggtgtggggagggagagcctctctcccccttttctgtgtgagaggaactcttagtgtctggtgcagctattaaatgtgcaatgtgtcaagtagcttgttttacacgctacaacatagctcattgtaacccattgtataagctgtgtattacaaatataacacaacaattaacttttc

SEQ ID NO: 330 - DNA, 828 bp, Homo sapiens
  misc_feature: Incyte ID No: 464482.1
gagccggccgcccagcccccagtggggttcccggcgcggggaatgtcccgggtggagctggctgagtcgcgcgctctgctccacccgacgggggctgtgtgtgctgggcctggctcgcggcgaaccgagatggcagagcagtcggacgaggccgtgaagtactacaccctagaggagattcagaagcacaaccacagcaagagcacctggctgatcctgcaccacaaggtgtacgatttgaccaaatttctggaagagcatcctggtggggaagaagttttaagggaacaagctggaggtgacgctactgagaactttgaggatgtcgggcactctacagatgccagggaaatgtccaaaacattcatcattggggagctccatccagatgacagaccaaagttaaacaagcctccggaaactcttatcactactattgattctagttccagttggtggaccaactgggtgatccctgccatctctgcagtggccgtcgccttgatgtatcgcctatacatggcagaggactgaacacctcctcagaagtcagcgcaggaagagcctgctttggacacgggagaaaagaagccattgctaactacttcaactgacagaaaccttcacttgaaaacaatgattttaatatatctctttctttttcttccgacattagaaacaaaacaaaaagaactgtcctttctgcgctcaaatttttcgagtgtgcctttttattcatctactttattttgatgtttccttaatgtgtaatttacttattataagcatgatcttttaaaaatatatttggcttttaaagtaaaaaaa

SEQ ID NO: 331 - DNA, 3616 bp, Homo sapiens
  misc_feature: Incyte ID No: 402716.20
cgggtgttgtaagatctggggagaggggaagtactggctccttctaatcagcaacactgtgtgggcatacaatggaggaatccagtaatggaaactataggcctgagtaatttagaacagaatttcacaattatatacagcatataggtagggaaggacatggagtatataattgtaaatattgtgtgggctccgcgcgctgcgggctgcggcagggtccggccggatgtctctgcagagcctggagtttgcatgaaactttcacctgcgctccggggagactttcggttccggctcccaccgcgcgcctcgccgccctcgcgaccgcgggctccgtccaacccggcccgacatggacgtgctccccatgtgcagcatcttccaggagctccagatcgtgcacgagaccggctacttctcggcgctgccgtctctggaggagtactggcaacagacctgcctagagctggaacgttacctccagagcgagccctgctatgtttcagcctcagaaatcaaatttgacagccaggaaggatctgtggaccaaaatcattcttggctcgggagaaaaaggaggaatccgaactgaagatatcttccagtcctccagaggacactctcatcaaggcccgagcttttggttacaacttagagaccaacagcctgaactcagatgtcagcagcgaatcctctgacagctccgaggaactttctcccacggccaagtttacctccgaccccattggcgaagttttggtcagctcgggaaaattgagctcctctgtcacctccacgcctccatcttctccggaactgagcagggaaccttctcaactgtggggttgcgtgcccggggagctgccctcggccagggaaggtgcgcacggggacttcggggaagccaggagaaaagggaaatggcgatgcctcccccgacggcaggaggagggtgcaccggtgccactttaacggctgcaggaaagtttacaccaaaagctcccacttgaaagcacaccagcggacgcacacaggtcagtgcccacgcgggccccggagggcggtcgctggtgggcgccactgcattgcaccagccctggagggagccgggcctggctgcacaggatgtggtcagggcagacaaatcctcacttcctcagatgttttccaccaaagcattaggtctttttggagttcagagtagaatcctaaagactggacttttgagttggataaatgtgtaacaattttcagattaaacaaacaagagactagatccttttctccacggacacccaaacctccaccccccaccccttagtagtgctggggatccgaggccactgccccttcaccagtgcactcgcacgaggctacctcgagcggccctggggtttcctaaatgaaactcaagggtcaggacagagggttgctgggcagcgtggagtgtgtgggtttgatgctgacggcccgaggcccgagtgggaccggcctgctctgtaagcagcagcattgatcagcgagtgtttcctgagaacttctccgtgtctcatgcagcctttgtttctgataccgcttgaaacagtttcttaatgaaatgccatacctaggtgaaagtgctatttaaaaataccttgacatgttctaggataattggtgaggaatcacagaacatttagaactgggaagggtcttagtgatcacgtgatgcaggctcttctcttatcagtaggagagcaaattgctgagagtcagtcccagacaggcttggtgacagctgagattgagatccgggtggcccaatatccaggcccaggcctgtctcaacataccctgagattggcttgacaactttgttttctcaggtagcacttgtagtaaattcatatttatgatttgaccaaggaatgaagtgaacccagttgttcaattgccatttagagaatgattccggggccctgtactggggctttccagaagctcgtaacttcagctttgtagaaaggtagaacgtccctgaggaaactgcagaggcacattccatagggaagtgaggatggaacagaagtgtgtttgggagaaacagttgccatgaagaaagcaatagctctgcctttgccggggctgtgggtccggcaggctgacacctcatcccgcaagcattttgctggtctgagtcgtggtcgttcttccacgttaactttgatgacagcaccatgggcttggctgaagctgtgtcccttggacagcagtgggaggcctgagactgggtcaggagagagctgctgttgtctctctgaggctgccagttgttgtgtgttaccgatgccagaagccactgggtccctggccttgcatcccaccactgtgtgtgttgttgaatttcccctttccgtctgcgggtcagtgaagtcatgggctgcttgtcctgtgctctctccccaggagaaaagccttacagatgctcatgggaagggtgtgagtggcgttttgcaagaagtgatgagttaaccaggcacttccgaaagcacaccggggccaagccttttaaatgctcccactgtgacaggtacgtgcctgaggacaatgctgggcaaggagcgtggggccttgggaatgtgatgaccagggttgagtaggtgtgcagggcacattcgaaggaaggcatgcagtttcctatgtgtgaacatttcttttcaagcctgggactttttagaaagtttctggtgtgctcattgtccatggttaggaagaactgttccacatacacctgacattggagtcagtttattgatatgtttggagattggcctttcaacagttttcatatttgaagaattagaaatgaagtccgttcagattctccaaagaacctccagccactggtgggggacattcttaattcacattcctatcagttggtatctcctgtccctgaagacactgatgaggcttgggaggagaatcccacctttccctgcagggggttaggctgggcagggcagggaggtgagggcgctggtccagaacactggcaagggatgggaacctaacttcttctgtgcttctgatttgcccttgcaggtgtttttccaggtctgaccacctggccctgcacatgaagaggcacctctgagggagcagagaggtggatcctgtaggctaaaaggcttccaggctgagagccggccgtggaaggagggatgcgtgttccagccaaagcatgccgttctgcaccctacccagttgcctccagggcctctccttggaaggtcttttgagggctaaaaaggtcctgtaagaagtggcatagcacccgtggtgcatggtatgtgggtgaccctggactcgccactggtacccgcccttccgagcggcgcctaagcctttgccgtgagcatgcacactgagaatgctaatggttgggttgattgtatgttgaggatctattactgaccgtatgatgaggccaacttttttttccttgtggttagcaagactgcaagagatggaaaaaaagtagtttgaatgttttgtgtgtaaggagtataccatgagatgagatgaccaccaatcatttccttggggggagggggtgtctgcaccttagaaaaaa

SEQ ID NO: 332 - DNA, 1170 bp, Homo sapiens
  misc_feature: Incyte ID No: 1137710.5
attctgagccaagtccggtgccaagcgcagctagctcagcaggcggcagcggcggcctgagcttcagggcagccagctccctcccggtctcgccttccctcgcggtcagcatgaaagccttcagtcccgtgaggtccgttaggaaaaacagcctgtcggaccacagcctgggcatctcccggagcaaaacccctgtggacgacccgatgagcctgctatacaacatgaacgactgctactccaagcttcaaggagctggtgcccagcatcccccagaacaagaaggtgagcaagatggaaatcctgcagcacgtcatcgactacatcttggacctgcagatcaccctggacttgcatcccactattgtcagcctgcatcaccagagacccgggcagaaccaggcgtccaggacgccgctgaccaccctcaacacggatatcagcatcctgtccttgcaggcttctgaattcccttcggagttaatgtcaaatgacaggaaagcactgtgtggctgaataatcatgacttcttttttttctttgcacaacaacgacaacaacaaattcacagaaccttttcagcgctgaacttatttttcaaccatttcacaaggaggcagttgcatgacttttaaaagcaaaaaaggagaaactagatgaaaaagacttttaaatgccctttctgcagttggaaggtttttttcatatactattcccaccatggggagcagaaaccttaaaatcacaaggaattgcccaatctaagcagactttgccttttttcaaaggtggagcgtgaataccagaaggatccagtattcagtcacttaaatgaagtcttttcggtcagaaattacctttttgacacaagcctactgaatgctgtgtatatatttatatataaatatatctatttgagtgaaaccttgttaactctttaattagagttttcttgtatagtggcagagatgtctatttctgcattaaaaagtgtaatgatgtacttattcatgctaatactttttataaaagtttaaacttttagttgtaaacgtaacccttttatacaaaataaatcagtgtgtttattgaatggtgattgcctcgtttatttcagaggaccagtgctttgattttttattatgctatgttataactgaaccaaataaa

SEQ ID NO: 333 - DNA, 533 bp, Homo sapiens
  misc_feature: Incyte ID No: 348912.3
aggagaacacgcaggcagcagagaccatggggcccatctcagccccttcctgcagatggcgcatcccctggcaggggctcctgctcacagattaccccagggcctgcatacagcaatcgagagacaatataccccaatgcatccctgctgatgcggaacgtcaccagaaatgacacaggatcctacaccctacaagtcataaagctaaatcttatgagtgaagaagtaactggccagttcagcgtacatccggagactcccaagccctccatctccagcaacaactccaaccccgtggaggacaaggatgctgtggccttcacctgtgaacctgagactcagaacacaacctacctgtggtgggtaaatggtcagagtctcccggtcagtcccaggctgcagtgtccaatggcaacaggaccctcactctactcagtgtcacaaggaatgacgtggaccctatgaatgtgaaatacagacccagcgagtgcaacttcagtgaccagtcacctgaatgtctctatgggccagat

SEQ ID NO: 334 - DNA, 3725 bp, Homo sapiens
  misc_feature: Incyte ID No: 474926.11
tctgtgggtcagtagtccggcgtgacatgactaggtcttctgtgtaaggactcgcatggccaaagtcaaggtatctgaagggacaagggaaaaatccacttccaagttcaatctggttgtgagcagaattcagttccttgtggttgtaccatgaggtctctggtccccttcatcttcaaagccggtaatggacatcgagtgtttctcttgcttggaatctggcactctagctggagaaaattatctgcttttaagagttcatgtgattagattgggtgtacccagatgctccatgctaatctccctattaggtccataatcctaattgcatctgtgaagtgctttttgccaggtaacatggcatacttgtaggttccagggattagtgcttgtcctccccctgctattctttagtgggcagggggtcatctgcctaccacggaggtaaggggtcaggaggtatgcatacagcaatgcccaaaaagagactgtccccactgggatggagtttaccgcctagacatgcagtcttaactcagaaatatggagatagcctcgaaggacaggacaggtactgggcacgtgtgggaatggaccaagccaggtgctccgggggctttcccaaggaactaaggctgagccaagaactgaaggatgagttggagtcagatgagggaaaatgtgggcaaactggatttcagaaccaacccccaaccctggagccaggagccatggtactgaaggacagtgcgccataactcagagaaccagggagggttggcggaggctcacagggaccgggttaccccagggccttgtgacagtactatccctagtatcagaggagactgtcattggcatttaggccacttggtgctcataacaccttctatgtcaggtgaacactattgtcatccccaaattacagatggggaaagtgagccaaatgtccatgctagtaagaggcaaatcatatcacttctttgggtacccttctagaaggatgaggctgactgccactggaaacagctggggagggtacaaggagatgacaagtggctcagaggctgtcctggctgtaagaattaaagaggaaagaaacaccaagggtggctcgacagtcaacaaggacaggtttattttggaaaacaaacttgagaggggcttctggccaagttaggtcagagccacactctcttacaaactaaggatatttaagggttttggagggggttcttatcataggttccgaatgtttctgtgtgagggaaagtttattgcggggatggaatgtctctggtcagaagggaggctgtctcggggttggcatgtttctggtcagagaagggtttatcttagggttggaatgtttctggttatgctgacattagctattaggctgatattttcgggctggatttaggcggcttttaattaagggggagcttagaatggtggtgtttgttcaagatggcaatgctcctgctccgtcactggccaggtaaggcaaccctttgttgcggtaacaacctgagattggcaggggctcacctccaggggcagctcatgtgcttgctggcgaggctgcaccttgtcattcaggttcacagggcacaggtcaaccaggccctggctcttcagtcttctgcctggagtgacttatgtaattctgctcagctttcatagggcacagggagtcaggggctaactctgctgcctggggctggaaacagactcctcccttgaggagcagcagtccaccatagggaagtcacagtggtccaagccaaaggggatgcaggtagtgtagactaggtggtagttcagggaatggagagaagtgggaataaagggatagtgaaaggaagcatattttactggcaggtgatcagatgtaggaggacaagtcatacatttggactttacagagcagtggacactcagtcggctgctgtcagcgcctggggcttaggggagtgcccctggctggagacacggtatggagtgccatcagttagggagccctgggcacaggtaagagaaggggtgacagcaggagggaaagagtctggggcccagctgcaggaaccaatacccataggctatttgtataaatgggccatggggcctcccagctggaggctggctggtgccacgagggtcccacaggcatgggtgtccttcctatatcacatggccttcactgagactggtatatggattgcacctatcagagaccaaggacaggacctccctggaaatctctgaggacctggcctgtgatccagttgctgccttgtcctcttcctgctatgtcatggcttatcttctttcacccattcattcattcattcattcattcagcagtattagtcaatgtctcttgtatgcctggcacctgctagatggtccccgagtttaccattagtggaaaagacatttaagaaattcaccaagggctctatgagaggccatacacggtggacctgactagggtgtggcttccctgaggagctgaagttgcccagaggcccagagaaggggagctgagcacgtttgaaccactgaacctgctctggacctcgcctccttcccttcggtgcctcccagcatcctatcctctttaaagagcaggggttcagggaagttccctggatggtgattcgcaggggcagctcccctctcacctgccgcgatgactaccccgccccatctcaaacacacaagctcacgcatgcgggactggagcccttgaggacatgtggcccaaagacaggaggtacaggggctcagtgcgtgcagtggaatgaactgggcttcatctctggaagggtaaggggccatcttccgggttcaccgccgcatccccacccccggcacagcgcctcctggcgactaacatcggtgacttagtgaaaggactaagaaagacccgaggcgaggccggaacaggccgatttctagccgccaagtggagaacaggttggagcggtgcgccgggcttagcggcggttgctggaggaacgggcggagtcgcccagggtcctgccctgcgggggtcgagccgaggcaggcggtgacttccccactcggggcggagccgcagcctcgcgggggcggggcctggcgccggcggtggcgtcacaaaaggcgggaccacagtggtgtccgagaagtcaggcacgtagctcagcggcggccgcggcgcgtgcgtctgtgcctctgcgcgggtctcctggtccttctgccatcatgccgatgttcatcgtaaacaccaacgtgccccgcgcctccgtgccggacgggttcctctccgagctcacccagcagctggcgcaggccaccggcaagcccccccagtacatcgcggtgcacgtggtcccggaccagctcatggccttcggcggctccagcgagccgtgcgcgctctgcagcctgcacagcatcggcaagatcggcggcgcgcagaaccgctcctacagcaagctgctgtgcggcctgctggccgagcgcctgcgcatcagcccggacagggtctacatcaactattacgacatgaacgcggccaatgtgggctggaacaactccaccttcgcctaagagccgcagggacccacgctgtctgcgctggctccacccgggaacccgccgcacgctgtgttctaggcccgcccaccccaaccttctggtggggagaaataaacggtttagagactaaaaaaaaa

SEQ ID NO: 335 - DNA, 3809 bp, Homo sapiens
  misc_feature: Incyte ID No: 406804.4
  unsure 119, 2816-2818: a, t, c, g, or other
ggctaacaatgctaagagaggcctctgatgaaattgtggctgaaaaagaggctgaagttaaattgccagaggacagtagctgtacagaagatttaagttcatgcactagtgtgcctganatgaatgaagacgggaacaggaaagaaagcaactgtgccaaagacctcagaagtcagccacctactagaataccaacactggttgacaaagagacaaacactgatgaagccgctaatgacaatatggcagttcgccccaaagagcgcagcagcctgagctctagacagcatccgtttgtgaggagcagtgtgatagtgcgctcacagaccttttctccaggagagcggaaccagtacatctgcaggttaaatcggagtgacagtgacagttcaaccctggctaaaaaatcactgtttgtgagaaactccaccgaacgccgcagtttgagggtcaaaaggacggtttgccagtcagtccttagaagaacaacacaggaatgcccagtgcggacatctctagacttagaactggaccttcaggcatctctgacccggcagagccgcctcaatgatgagctgcaggcgctgagggacttgcggcagaagctggaggaactgaaagctcagggagagactgaccttccaccaggcgtgctggaggatgagaggttccagaggcttctgaagcaagctgagaagcaggctgaacagtccaaagaagagcagaagcaaggtctgaatgcagagaagttgatgaggcaagtctccaaggacgtgtgtcggctccgggagcagagccagaaggtgcctcggcaggtgcagtccttcagggagaagattgcctacttcaccagagcaaagataagcatcccatccctgccagctgatgatgtgtgattacatgacttaagaaattattttttcatctgttcactttcttagggagggtaaaagactgaagatttgtgtttttgttttggtgtttggttttttttggtaacgtaactgtcaactcttgaagaacttttatttcacatcagattttcaacacattaatttgtaaagtaccttgagtgtaatttttatatgcttaaaaaagaaaaaatcatataagaaagatgggataacctggtacacaaatgttgcccagtatgtgcgcattgccagtggacttcattttgtaaaaatggaatagaggcagtaccccaccatgtgtactgttgagccggctgttgagaaacaacttggttcagccggtggttttgcttctcctttgtgttcctgtgagtaggctgtgccgatggcagcagcgccacgtggtatctgtgcgctggcgaggagaggagcgctttccatttggaggcagtgtgagcacacgctggagtgcagcgttccaaagtccgcccgaaatggatgctgcgtccacggccatcacctgtgcgggaacacctggtttccttaagacaatttcctttttgtccttttatatttttctaaagaaaactaagatataaactaccaagtgctcttaagaataaaaataagaataagaatacaaaggagcactactcttggctacacgaaagatcttgggattcatgacactgagggcagggagaagaaagaacaccagccacgcagagatacaaataagctcatcaaatgagcagctggtttgtctcactcagcctgaatttgcattaagtgttcaaaagtgagtttctggcttgcactagtgttttgccctaaatctaaggatggtgcctagtggtggccctgtgttctgaggacagagagagctggaggggtggagggaaatgcatcggcactcatttggtgtaaccaagaagagggggaaagatgtcttgatagaatcaaagttgccaaaaacaaagaagagtttatcaagcagatttctaacatttagtagaaactacttcatagctctcatttttagggggttctatctataatttatggtaaatagttgggaggcaaagggaagaatgtgtgtggggggattattaatttgaagtataagctaaattgtttattaaaaagcctattttggatgaacaagtttagagagataaactgactaatgtgtcctccagtttagaatttcaccttacccgacccaggcacttcttaaaaacacagatcctcagtgcagctctgccagcatcaaggcttttaaaatatgtagtatttaggccatttaaaccatacttattactcaataacccaagaaacaattttgggttagccatctaatatagcaaataaaatagattttttaaagaaatccaaaattgtcttaaaggaatggaccccttgaagaaaaaaaaaaaaaagtttggttcctcagttagaatgctcactagctcactagcaagaatttttattttcttgaaagcaattatatatattttggaaagttcatgttattggaattgaagttcaaattaagcaacttctgagcctagaactttaattactttttcctaaatgtcccaacacttacatacaaatttctttgaagacataactggacatggcagacactgctttgaacaaaaaccagcctagtgaattgactgagtacagtcctttaaggctgcccagttcattctattagatgactaaggaaaactagaaaaagaatacagttcacccttgtcaaggtcaaatgtgaaagacagaagtttatttaatgtagaggtaaatgaaggtgagctgttttcagcatcttagtttgaccatgaaaatgtctatagaattatgtgtagttgttccgtacgattttattttcttcannnatttatttacagtcttatttatgttctgtttaatatatagtttgattctggccattttaaatatttgacacagaagagactatattggaatatttacagctttataagtctttcatcagattagctgttgactttttgtaatacaaaaagtttcagacaagtattaaagaataaaatctgtctcaggctggtagttagcagttgtgaccaagatgcttttggttgttgtatttcacaaaatttcctcatttctaacatgagagatgaacttattttaatataatcctttttctacactttaaaagtcagcaatagtgttatgtatttataggcagcttttaataatcttgtcatatttgtactaacccaaatgattcacagtgacaaaacattttaataacttgatcacaaaaccatatggacaaatatgaattttaatattataaatactatttttaaaaggtagaatttattcgcacagggtaaaaagaatgtaatatttagttctcaagtttgaattatcagtatattattacaattttgtatatcagaatcttaagtgttacaggtacaaaaagaatattgctagccaaatgaacaaagtttagctaaatctctgtagcatgcaaatcaaataaattaaaattttttgctattgctttatctatattgtcttaaatatcaaaagctcaggactgaacttaatatttaatcaggttaaattctgaacatgtttctgttttaatttgtcttgtttgtaaacgtatgcaaatacatcacatagattaactggtttctgcactttccatgtgtttgtgggtggaaaaaaattcagtggtttttttttaaaaaaaaaaagcaaaaacaaagctacatattgcctaatactctatttcagtgtcgtttattgttcagtttatttccctgattggcacaaacacaagagtttccttgaaccatgtaccaagcaaatacaaaatatttcatgaag

SEQ ID NO: 336 - DNA, 1070 bp, Homo sapiens
  misc_feature: Incyte ID No: 480855.1
cgccgccaggagcagaccctgcgtgatgccaccatggaggtgcagcgcgggcagttcagggggcggccggtctccgtgtgggacgtcctcttctcctcgtacctgagcgaggcccgccgagacgagctcctggcccagcacagcggccggcgccctgggcctgcccgacctcgtcgccgtcctcacccgggtcatcgaggagacggaggagcggctcagcaaggtgtccttccgcggcctgaggcgccaggtgtccgcctccgagctgcacacgtccgggatcctgggccccgagaccctgcgggacctggcccaggacactaagacgctgcaggaggtgacggagatggactcggtcaagcgctaactggaaggcaacaagtggcttcgggggcgtcctgggtgcccggccaaggaccagcccggccgccagggagaagatgaggcatcttaccaggcccatgttggaagggcgttgctgcggaccgggcacggacccttggatgcatgctgagagccgcaggcgggccaccggacttcggatcatcgagcccccgtgcgcaacccttgaggctgtctggtggaggaaggccggtgcccgcgggcgtggtgggcggcgagatccaggagcaagctgctgtcggccagagcgcgccgtcaccggctacaccgacccctacaccgggcagcagatctccctcttccaggccatgcagaaggacctcatcgtccgggagcacggcatccgcctgctggaggcccagatcgccacgggcggcattcatcgaccccgtgcacagccaccgcgtgccccgtggacgtggcctaccggcgcggctacttcgacgaggagatgaaccgcgtcctggccgaccccagcgacgacaccaagggtttcttcgaccccaacacgcacgagaacctcacgtacctgcagcttctgcagagggccaccctggaccctgagacggggctcctatttctttctctctctctacagtgactgggcttcctccgtgcagttttctgcaactctggagaagtggaggcatacttgtgtgtctgggttg

SEQ ID NO: 337 - DNA, 1247 bp, Homo sapiens
  misc_feature: Incyte ID No: 238593.5
ggcacgtgccattttaaaccacaagagcaaggtaagaaaaactggagcccaatattcaatcacacaagtactcccaggcccccacctcacagagacactggcacgcaggcatgctcagcaggtgtgtgtgtgaagccagacacacgcatactcacgtgcaggcgctcacacgtgtgcacttgcaccatgtacacatagccaaagccgccccgtcagggttggggagggagtccggactcaaggatgggcctggtaagccacagctctgcaggcatcacagcgcaggtgagcgggcatgtgggctgagtacatctcctcatcatccagttgtggggctgtggctgtgagtggcgccctgtccccgaggccccctgggatggcccaggctcccagcagcagcagactacacttgctgaactggctcctggggccatgaggctgtcactgccactgctgctgcttgctgcttgggagcctgggccatcccagggggcctcggggacagggcgccactcacagccacagccccacaactggatgatgaggagatgtactcagcccacatgcccgctcacctgcgctgtgatgcctgcagagctgtggcttaccagatgtggcaaaatctggcaaaggcagagaccaaacttcatacctcaaactctggggggcggcgggagctgagcgagttggtctacacggatgtcctggaccggagctgctcccggaactggcaggactacggagttcgagaagtggaccaagtgaaacgtctcacaggcccaggacttagcgaggggccagagccaagcatcagcgtgatggtcacagggggcccctggcctaccaggctctccaggacatgtttgcactacttgggggagtttggagaagaccagatctatgaagcccaccaacaaggccgaggggctctggaggcattgctatgtgggggaccccagggggcctgctcagagaaggtgtcagccacaagagaagagctctagtcctggactctaccctcctctgaaagaagctggggcttgctctgacggtctccactcccgtctgcaggcagccaggagggcaggaagcccttgctctgtgctgccatcctgcctccctcctccagcctcagggcactcgggcctgggtgggagtcaacgccttcccctctggactcaaataaaacccagtgacctcacttcttttctctgcaaaaggtgcttgtggggctgggagtgcagaca

SEQ ID NO: 338 - DNA, 508 bp, Homo sapiens
  misc_feature: Incyte ID No: 373514.7
gtttgtctcaacccatgaagcagcttaacaagcaactattaaagcatagagggccgttgctccagggagaactgcaaatatcttcatccacccccacatttaaaaacgcagttggagataaatggacgcaataacttgattcagcagaagaacatggccatgttggcccagcaaatgcaactagccaatgccatgatgcctggtgccccattacaacccgtggtatgtcgagagtaccaacgtggcaattgcaaccgaggagaaaatgattgtcggtttgctcatcctgctgacagcacaatgattgacaccaatgacaacacagtcactgtgtgtatggattacatcaaagggagatgctctcgggaaaagtgcaaatactttcatccccctgcacatttgcaagccaagatcaaggctgcccaataccaggtcaaccaggctgcagctgcacaggctgcagccaccgcagctgccatggggaattcctcaagctgtacttccccca

SEQ ID NO: 339 - DNA, 792 bp, Homo sapiens
  misc_feature: Incyte ID No: 1383354.10
  unsure 500: a, t, c, g, or other
cccaagcgccttctccgcaccagggaagccccacccaccagaagccaagatgtccagcaagcgggccaaagccaagaccaccaagaagcggccacagcgggccacatccaatgtcttcgcaatgtttgaccagtcccagatccaggagtttaaggaggctttcaacatgattgaccagaaccgtgatggcttcattgacaaggaggacctgcacgacatgctggcctcgctggctgaacggcacggaccccgaggatgtgattcgcaacgcctttgcctgcttcgacgaggaagcctcaggtttcatccatgaggaccacctccgggagctgctcaccaccatgggtgaccgcttcacagatgaggaagtggacgagatgtaccgggaggcacccattgataagaaaggcaacttcaactacgtggagttcacccgcatcctcaaacatggcgccaaggataaagacgactaggccaccccagcccctgacaccccagcncccgccagtcacccctccccgcacacacccgtccataccagctccctgcccatgaccctcgctcagggatccccctttgaggggttagggtcccagttcccagtggaagagacaggccaggagaagtgcgtgccgagctgaggcagatgttcccacagtgaccccagagccctgggctataagtctctgacccctccaaggaaagaccaccttctggggacatgggctggagggcaggacctagaggcaccaagggaaggcccattccgggctgttccccgaggaggaaggg

SEQ ID NO: 340 - DNA, 1983 bp, Homo sapiens
  misc_feature: Incyte ID No: 3120070CB1
ggaaccgcctccccgcggcctcttcgcttttgtggcggcgcccgcgctcgcaggccactctctgctgtcgcccgtcccgcgcgctcctccgacccgctccgctccgctccgctcggccccgcgccgcccgtcaacatgatccgctgcggcctggcctgcgagcgctgccgctggatcctgcccctgctcctactcagcgccatcgccttcgacatcatcgcgctggccggccgcggctggttgcagtctagcgaccacggccagacgtcctcgctgtggtggaaatgctcccaagagggcggcggcagcgggtcctacgaggagggctgtcagagcctcatggagtacgcgtggggtagagcagcggctgccatgctcttctgtggcttcatcatcctggtgatctgtttcatcctctccttcttcgccctctgtggaccccagatgcttgtcttcctgagagtgattggaggtctccttgccttggctgctgtgttccagatcatctccctggtaatttaccccgtgaagtacacccagaccttcacccttcatgccaaccctgctgtcacttacatctataactgggcctacggctttgggtgggcagccacgattatcctgattggctgtgccttcttcttctgctgcctccccaactacgaagatgaccttctgggcaatgccaagcccaggtacttctacacatctgcctaacttgggaatgaatgtgggagaaaatcgctgctgctgagatggactccagaagaagaaactgtttctccaggcgactttgaacccattttttggcagtgttcatattattaaactagtcaaaaatgctaaaataatttgggagaaaatattttttaagtagtgttatagtttcatgtttatcttttattatgttttgtgaagttgtgtcttttcactaattacctatactatgccaatatttccttatatctatccataacatttatactacatttgtaagagaatatgcacgtgaaacttaacactttataaggtaaaaatgaggtttccaagatttaataatctgatcaagttcttgttatttccaaatagaatggactcggtctgttaagggctaaggagaagaggaagataaggttaaaagttgttaatgaccaaacattctaaaagaaatgcaaaaaaaaagtttattttcaagccttcgaactatttaaggaaagcaaaatcatttcctaaatgcatatcatttgtgagaatttctcattaatatcctgaatcattcatttcagctaaggcttcatgttgactcgatatgtcatctaggaaagtactatttcatggtccaaacctgttgccatagttggtaaggctttcctttaagtgtgaaatatttagatgaaattttctcttttaaagttctttatagggttagggtgtgggaaaatgctatattaataaatctgtagtgttttgtgtttatatgttcagaaccagagtagactggattgaaagatggactgggtctaatttatcatgactgatagatctggttaagttgtgtagtaaagcattagggtcattcctgtcacaaaagtgccactaaaacagcctcaggagaataaatgacttgcttttctaaatctcaggtttatctgggctctatcatatagacaggcttctgatagtttgcaactgtaagcagaaacctacatatagttaaaatcctggtctttcttggtaaacagattttaaatgtctgatataaaacatgccacaggagaattcggggatttgagtttctctgaatagcatatatatgatgcatcggataggtcattatgattttttaccatttcgacttacataatgaaaaccaattcattttaaatatcagattattattttgtaagttgtggaaaaagctaattgtagttttcattatgaagttttcccaataaaccaggtattctaaacttgaaaaaaaaa

SEQ ID NO: 341 - DNA, 2066 bp, Homo sapiens
  misc_feature: Incyte ID No: 253987.19
  unsure 78, 112, 132, 148, 150, 157, 1405: a, t, c, g, or other
gggaacaaggcggcactaattccttacaagtttcccttgaaaaatctttcgcttaaaaaaaacggggggtggggggancttctttgctgttcagggatttatgacctcggangagctgtgggctcgaaccantgttgggctaaaggcngnctggcanggggcagggaagctcaaagatctggggtgctgccaggaaaaagcaaattctggaagttaatggttttgagtgatttttaaatccttgctggcggagaggcccgcctctccccggtatcagcgcttcctcattctttgaatccgcggctccgcggtcttcggcgtcagaccagccggaggaagcctgtttgcaatttaagcgggctgtgaacgcccagggccggcgggggcggggccgaggcgggccattttgaataaagaggcgtgccttccaggcaggctctataagtgaccgccgcggcgagcgtgcgcgcgttgcaggtcactgtagcgggacttcttttggttttctttctctttggggcacctctggactcactccccagcatgaaggcgctgagcccggtgcgcggctgctacgaggcggtgtgctgcctgtcggaacgcagtctggccatcgcccggggccgagggaagggcccggcagctgaggagccgctgagcttgctggacgacatgaaccactgctactcccgcctgcgggaactggtacccggagtcccgagaggcactcagcttagccaggtggaaatcctacagcgcgtcatcgactacattctcgacctgcaggtagtcctggccgagccagcccctggaccccctgatggcccccaccttcccatccagacagccgagctcgctccggaacttgtcatctccaacgacaaaaggagcttttgccactgactcggccgtgtcctgacacctccagaacgcaggtgctggcgcccgttctgcctgggaccccgggaacctctcctgccggaagccggacggcagggatgggccccaacttcgccctgcccacttgacttcaccaaatcccttcctggagactaaacctggtgctcaggagcgaaggactgtgaacttgtggcctgaagagccagagctagctctggccaccagctgggcgacgtcaccctgctcccaccccacccccaagttctaaggtctcttcagagcgtggaggtgtggaaggagtggctgctctccaaactatgccaaggcggcggcagagctggtcttctggtctccttggagaaaggttctgttgccctgatttatgaactctataatagagtatataggttttgtaccttttttacaggaaggtgactttctgtaacaatgcgatgtatattaaactttttataaaagttaacattttgcataataaacgattttntatcatatacacaagtgtttaaaaatcgtttattatgcaaaatgttaacttttataaaaagtttaatatacatcgcattgttacagaaagtcaccttcctgtaaaaaaaggtacaaaacctatatactctattatagagttcataaatcagggcaacagaacctttctccaaggagaccagaagaccagctctgccgccgccttggcatagtttggagagcagccactccttccacacctccacgctctgaaaagaccttagaacttgggggtggggtgggagcagggtgacgtcgcccagctggtggccagagctagctctggctcttcaggccacaagttcacagtccttcgctcctgagcaccaggttcagtctccaggaagggatttggtgaagtcaagtgggcagggcgaagttggggcccatccctgccgtccggcttccggcaggagaggttcccggggtcccaggcagaacgggcgccagcacctgcgttctgggcgggggaggaaagaagaccaaggagcagtcagtttccgccgagcgtgccgaggcgggggccgtccgcagactggccggcgccagggaggaaacttggtctgtacctccagctgataactccgagggtcccgcagcatccttgcctgggtgttcagccc

SEQ ID NO: 342 - DNA, 1414 bp, Homo sapiens
  misc_feature: Incyte ID No: 133425.16
gatgaagtctcacctcagtactggagactggaattctcaccctgagacatcaaaaatcagtctccatgtcagcctttgctactttctcttggcagaagaaaattaggataataaagttaaacaaatgaatgaattcatggcagtaaaacatcttcccttctggggtccatggtcccagatgggatgaaatgtggttcccccactcaaatgcccgtcaagtggtgtctgccccttgctaggcctgcctgaggtgcatctatcagttatctcgagaccgagagtgcccatcgtgacatctccctaaagaggttacaagctagtgaatatgaagagaagaaatggctgtgtggagcttgctctatatggaatatctgattttgtcctttctttgtttaaaagccatcgatggctgctgtttgctagagatgaagctcaaatgtttgcaggacgttcaaggaggcctcagatctgccccaggctttctctccagcttactcatctctcctttcaccttatcctggattcccctcctgcccccaagctccgcacacgcacacccgagtcccgcaggctcctcctccaggaccatatccctctccacattgctaagcagacacttgtgcagtttcctctcctgtaaattacacactgcctcccacccctgcccggttccttagcttggtaacaaactttctcagcctttaaggtgttactaaatggtacagtttctgtaatgcctgcctcagccccataaccagaatcaaccataccctcgttggggcttctgtgggtaatctgacctattgtgagatgatgagaggctgtctccatttttccattttctatttattgggaacaggattctcatcacattttttagcacagccccaaatacataccttgtaggtgctcggtgaatggatgtggaatcaaagaaacttaggagacaccaagaaaactctctttcttattttctgcaatcctaattcttgctggtcttaacttgcaggataattcagctccttatggggcccggtatgtgggctccatggtggctgatgttcatcgcactctggtctacggagggatatttctgtaccccgctaacaagaagagccccaatggaaagctgagactgctgtacgaatgcaaccccatggcctacgtcatggagaaggctgggggaatggccaccactgggaaggaggccgtgttagacgtcattcccacagacattcaccagagggcgccggtgatcttggggtcccccgacgacgtgctcgagttcctgaaggtgtatgagaagcactctgcccagtgagcacctgccctgcctgcatccggagaattgcctctacctggaccttttgtctcacacagcagtaccctgacctgctgtgcaccttacattcct

SEQ ID NO: 343 - DNA, 2210 bp, Homo sapiens
  misc_feature: Incyte ID No: 468221.18
  unsure 231, 274, 348, 1366-1671, 1824: a, t, c, g, or other
cccaacctcgcggctgcccgaaggacctgttgtgccgggtccggaaagcgtgtttcgctccctttcccttgagggagtggggagggaatgtgactcttttcgcccagcgccgtggactcgcggcttgtggctcccaagttagggagtgagaggatcgcccgccgagggggtggctccgcagcccggctgcgcgagacgcttcccgctcggggacccgccttccgaggccangtgaacgttaccggccccctgacctccagcagatccacaccantgttggagactgaaccgttgcaaggaacagacgaagatgcagtagccagtgctgacttctctagcatgctctcngaggaggaaaaggaagagttaaaagcagagttagttcagctagaagacgaaattacaacactacgacaagttttgtcagcgaaagaaaggcatctagttgagataaaacaaaaactcggcatgaacctgatgaatgaattaaaacagaacttcagcaaaagctggcatgacatgcagactaccactgcctacaagaaaacacatgaaaccctgagtcacgcagggcaaaaggcaactgcagctttcagcaacgttggaacggccatcagcaagaagttcggagacatgagacgaaagtaggcggtacgaaccctaatggaggcagttttgaggaggtcctcagctccacggcccatgccagtgccccagagcttggcaggaggctcccggcggaccaaggaggaggagctgcagtgctaagtccagccagcgtgcagctgcatccagaaaccggccactacccagcccatctctgcctgtgcttatccagataagaagaccaaaatcccgctgggaaaaacccaggccttgacattgttattcaaatggcccctccagaaagtttaatgatttccatttgtatttgtgttgatgatggaccacttgaccatcacatttcagtattcatagatgactgtcacattttaaaatgttcccacttgagcaggtacacaactggtcataattcctgtctgtgtaattcgatgtatatttttccaaacatgtagctattgtttgctttgatttttgcttggcctcctttatgatgtgcatgtccttgaaggctgaatgaacagtccctttcagttcagcagatcaacaggatggagctcttcatgactgtctccagcaataggatgatttactataaatttcatccaactacttgtgatctctctcacctacatcaattatgtatgttaatttcagcaattaaaagaattgattttaatgactttgaattcttaatttctttgtcttaaaagttgctagttatgattttacagatgcaattttnnnnnnnnnnnnnnnnnnnnnnnnnnnnnnnnnnnnnnnnnnnnnnnnnnnnnnnnnnnnnnnnnnnnnnnnnnnnnnnnnnnnnnnnnnnnnnnnnnnnnnnnnnnnnnnnnnnnnnnnnnnnnnnnnnnnnnnnnnnnnnnnnnnnnnnnnnnnnnnnnnnnnnnnnnnnnnnnnnnnnnnnnnnnnnnnnnnnnnnnnnnnnnnnnnnnnnnnnnnnnnnnnnnnnnnnnnnnnnnnnnnnnnnnnnnnnnnnnnnnnnnnnnnnnnnnnnnnnnnnnnnnnnnnnnnnnnnnnnnnnnnnnntaataagtagtcaacttttactgctaatttggtgaacatgagagaggatatgaaaataaatattacctcagctatcctaggatgttaaaataatctccaattttaaaattctctccaatctacatacagtagtagttagtcagataaaggatntccaaaaaagagatagctagaaaatgggagaagcagagttctgcaacccctttcagtttgtaaattgttcacatgtatgaaaataactggtatttatcaatccactcagatttctgcactaacttttatcttatatatcatatgtatctcttttctttttctaaatgggaacatatatttgttattaggtggcagagatatagccttaagatatatttgtaaaatgcacactgaatagacatccaacctaaaaaaaatcactatttaaaaagcccatataatatatacatatttgttagcatgctaattgttcatgttttgtgtttattaaatagaagtgatatatatgacattttgaagtaaagcacatctgaaaaattctcctc

SEQ ID NO: 344 - DNA, 926 bp, Homo sapiens
  misc_feature: Incyte ID No: 020093.8
aggggacgggaaaggggccagcctgctgggccatgggaggggaccgtcaggggaaagcccttcccgcctctggggaagggaacttccgcttcggaccgagggcagtaggctctcggctcctggttcccactgctgctcagcccagtggcctcacaggacaccagcttcccaggaggcgtctgacacagtatgatgatgaagatcccatggggcagcatcccagtactgatgttgctcctgctcctgggcctaatcgatatctcccaggcccagctcagctgcaccgggcccccagccatccctggcatcccgggtatccctgggacacctggccccgatggccaacctgggaccccagggataaaaggagagaaagggcttccagggctggctggagaccatggtgagttcggagagaagggagacccagggattcctgggaatccaggaaaagtcggccccaagggccccatgggccctaaaggtggcccaggggcccctggagccccaggccccaaaggtgaatcgggagactacaaggccacccagaaaatcgccttctctgccacaagaaccatcaacgtccccctgcgccgggaccagaccatccgcttcgaccacgtgatcaccaacatgaacaacaattatgagccccgcagtggcaagttcacctgcaaggtcaccaccggtggcatggtcctcaagctggagcagggggagaacgtcttcctgcaggccaccgacaagaactcactactgggcatggagggtgccaacagcatcttttccgggttcctgctctttccagatatggaggcctgacctgtgggctgcttcacatccaccccggctccccctgccagcaacgctcactctacccccaacaccaccccttgcccagccaatgcacacagtagggcttggtg

SEQ ID NO: 345 - DNA, 1439 bp, Homo sapiens
  misc_feature: Incyte ID No: 1556751CB1
gagtatcccttgtttaatcacttttgtggttaaaagagacctttgggtcagtctgcctcattccttgaagagtttagccctggctcacttttcactctatttcttctcctgtctcaagaaagaagaaaaaaagagacaaattacccagaaacccctcccttccccacatggaggccttggcaaatgttaattttcctagaaaatccttcagacctgaagacgcaggaaaagaatctggctctcagggtggcttctgcgtccccgccgccaggccccagactatggtcacagggccgtcctgttcctccccgggactccagaatttctctcctcaaaggaaagaaaacagggcatgcgcttgttggcaaaacgcagggccggctcccaaaaaccccatgtgtgtacgattaaaagttggccgtccccaggcctcccagcgcaaacttaaagagacagggctttgctgaaaaccaaacatgggccagctgggctttttaacaacctagagactttccggagctgcctggaacagagcctgcgggaaacggggcttgccagagacactcacagtttccttcatggcctgttttggtcccctaagaatctccacatcattgtctttcttgtgccttttccttggtgagcaacagaaagggaagggttccaagcctctaaaaatgtgctttgtgatcaggagtgcgctccaaaccaaatacgcgcgctgccctttcgaggccagtgagctcagcctccaaggctttaaagccacatttcagcaagagaaagcgctgagagctcgcaggttcattaaagaaggcaaagcactggtttctctccttagaaaagtaggtttcttggcttgatgtagactggcttgctttgatttttagtgaagggaatgtacgtaaaacaaaatagggcttggctggtcaaaggagacaagcaggatggatggatggatggatggatggatgtatggatgaatagatagatggtgtttgcatgtaaattgcagagaaaacaaaaccaaagctgattggaaacaattaattgtgggtgtctgagggggaaggtcgcagctttgggcagctttgagaagcggtacaagagttctgtgcctgtgtgtccagccctggagccagccagtgcatttattttaagctcttagaagcaactccttggcccaggaatgcgtgacccctgagatgggtccacgcatctctctacacttccttctctccgtgggatactggactcgtgcctctgcgcccattctcttctcacgcatatccatgagctttaatttcactttctgatcacggtacgtccataaagccagtattacacttaaatgaagtattcttttttgtaatcgttttttttagaaggtaaacaaatttaataaagctaccaataatgagaaaaaaaaaaaaaaaaaa

SEQ ID NO: 346 - DNA, 1588 bp, Homo sapiens
  misc_feature: Incyte ID No: 1397976.1
  unsure 1321: a, t, c, g, or other
gcacagaaggaggaaggacagcacagcctacagccgtgctcaggaagtttctgggatcctaggctcagctccacagaggagaacacgcaggcgcagagaccatggggcccctctcagcccctccctgcacacagcacatcacctggaagggggtcctgctcacagcatcacttttaaacttctggaacctgcctatcactgctcaagtgcacgattgaagccctgccacccaaagtttccgaggggaaggatgttcttctacttgtccacaatttgcctcagaatcttgctgggctacatctggtacaaaggacaactgatgggacctctaccaattacattacatcatattgtaagtagacggtcaaataaatatatatgggcctgcatacacttggacgagaaacagtatattccaatgcatccctgctgatccagaatgtcacacaggaggatgcaggatcctacaccttacacatcataaagcgaggcgattgggactggaggagtaactggatatttcaccttcaacttatacctgaagctgcccaagccctacatcaccatcaacaactcaaaacccagggagaataaggatgtcttagccttcacctgtgaacctaagagtgagaacttacacctacatttggtggctaaatggtcagagcctcccggtcagtcccagggtaaagcaacccacttgaaaacaggatcctcattctacccagtgtcacgagaaatgaaacaggaccctatgaatgtgaaatacggggaccgagatggtgggcatgcacagtgacccagtcaccctgaatgtcctctatggtccagacctccccagcatttacccttcatttcacctatttaccgtttcagggaggaaaacctctacttgtcctgctttcgcgggaatcttaacccaccgggcagagtatttttggacaattaatgggaagtttcagcaatcaggacaaaagctctctatcccccaaattactacaaagcatagagggctctatacttgctctgttcgtaactcagccactggcaaggaaagctccaaatccatgacagtcgaagtctctgctccttcaggaataggacgtcttcctctccttaatccaatataggcagccgtgaagtcatttctgtatttcaggaagactggcaggagatttatgggaaaagactctgacaaggactcttgaatatcaagttccctgataacttccaagatcataccactggactaagaactttcaaaattttaatgaacaggctgataccttcatggaaattcaagacaaagaagaaaaaaacncccatgttattgggacctaaataatcaaaagcataatgttttccataattttcctatttgaaaaatgtggctgattccttgaatggttttattctccagatttatgaactttttttcttgagcaattggtaaagtatacttttgtaaacaaaaattgaaacatttgcttttgctctctatctgagtgccccagaattgggaaactattcatgagtattcatatgtttatggtaataaagctatttgcacaagttcaaaaaaaaaaaa

SEQ ID NO: 347 - DNA, 1943 bp, Homo sapiens
  misc_feature: Incyte ID No: 233828.16
gctcgggacaaggacatagggctgagagtagccatgggctctggaggagacagcctcctggggggcaggggttccctgcctctgctgctcctgctcatcatgggaggcatggctcaggactccctccagcacccctctttcctcatgaaactcccccaactcagagtcaacagacccagcctccggtggcaccacaggctccctcctccatcctgctgccagcagcccccatccccatccttagcccctgcagtccccctagcccccaggcctcttccctctctggccccagcccagcttccagtcgcctgtccagctcctcactgtcatccctgggggaggatcaagacagcgtgctgacccctgaggaggtagccctgtgcttggaactcagtgagggtgaggagactcccaggaacagcgtctctcccatgccaagggctccttcaccccccaccacctatgggtacatcagcgtcccaacagcctcagagttcacggacatgggcaggactggaggaggggtggggcccaaggggggagtcttgctgtgcccacctcggccctgcctcacccccacccccagcgagggctccttagccaatggttggggctcagcctctgaggacaatgccgccagcgccagagccagccttgtcagctcctccgatggctccttcctcgctgatgctcactttgcccgggccctggcagtggctgtggatagctttggtttcggtctagagcccagggaggcagactgcgtcttcatagatgcctcatcacctccctccccacgggatgagatcttcctgacccccaacctctccctgcccctgtgggagtggaggccagactggttggaagacatggaggtcagccacacccagcggctgggaagggggatgcctccctggccccctgactctcagatctcttcccagagaagtcagctccactgtcgtatgcccaaggctggtgcttctcctgtagattactcctgaaccgtgtccctgagacttcccagacgggaatcagaaccacttctcctgtccacccacaagacctgggctgtggtgtgtgggtcttggcctgtgtttctctgcagctggggtccaccttcccaagcctccagagagttctccctccacgattgtgaaaacaaatgaaaacaaaatttgagcaaagctgacctggagccctcagggagcaaaacatcatctccacctgactcctagccactgctttctcctctgtgccatccactcccaccaccaggttgttttggcctgaggagcagccctgcctgctgctcttcccccaccatttggatcacaggaagtggaggagccagaggtgcctttgtggaggacagcagtggctgctgggagagggctgtggaggaaggagcttctcggagccccctctcagccttacctgggcccctcctctagagaagagctcaactctctcccaacctcaccatggaaagaaaataattatgaatgccactgaggcactgaggccctacctcatgccaaacaaagggttcaaggctgggtctagcgaggatgctgaaggaagggaggtatgagaccgtaggtcaaaagcaccatcctcgtactgttgtcactatgagcttaagaaatttgataccataaaatggtaaagacttgagttctgtgagatcattccccggagcaccatttttaggggagcacctggagagatggcaagaatttcctgagttaggcagggatcaggcattcattgacactcagggagtgtcacacatttctgttctgcaattaaagggagaatgaggttcatccaccaaattttaagcagaatataggaagggcaggggtggggagtttcagggtctgctggtcctggcaacttatattaaatccacctcctcaagataagccttagggatattt

SEQ ID NO: 348 - DNA, 1254 bp, Homo sapiens
  misc_feature: Incyte ID No: 1253414CB1
cggctcgagctgagccgccgccgaggattcagcagcctcccccttgagccccctcgcttcccgacgttccgttcccccctgcccgccttctcccgccaccgccgccgccgccttccgcaggccgtttccaccgaggaaaaggaatcgtatcgtatgtccgctatccagaacctccactctttcgacccctttgctgatgcaagtaagggtgatgacctgcttcctgctggcactgaggattatatccatataagaattcaacagagaaacggcaggaagacccttactactgtccaagggatcgctgatgattacgataaaaagaaactagtgaaggcgtttaagaaaaagtttgcctgcaatggtactgtaattgagcatccggaatatggagaagtaattcagctacagggtgaccaacgcaagaacatatgccagttcctcgtagagattggactggctaaggacgatcagctgaaggttcatgggttttaagtgcttgtggctcactgaagcttaagtgaggatttccttgcaatgagtagaatttcccttctctcccttgtcacaggtttaaaaacctcacagcttgtataatgtaaccatttggggtccgcttttaacttggactagtgtaactccttcatgcaataaactgaaaagagccatgctgtctagtcttgaagtccctcatttaaacagaggtcaagcaataggcgcctggcagtgtcaagcctgaaaccaagcaataccgtcatgtttcagccaagcccagagccctaagattacaaacaactatggccggaacctcctcagctctccctctgcagagttccctaccctaagagaatgttaccacctgaacagtcctcggtgaatctgagaggagaggatggggtaaggcagaagcaccagctgtactactagaagggagcttttggtggtagatcccctggtgtctccaacctgactaggtggacagagctcaaagaggccctcttaccgctagcgaggtgataggacatctggcttgccacaaaggtctgttcgaccagacatatcctagctaagggatgtccaaacatcagaatgtgaggccaaccttctatcagagttaaacttttgacaagggaacaaatctcaaactgatccatcagtcatgtagctagctgtagagcttgcaacttaatagcagcagctgcccaatgccatgtgaagtaacaaactggtttttggtttttttttccccttcag

SEQ ID NO: 349 - DNA, 859 bp, Homo sapiens
  misc_feature: Incyte ID No: 1101068.1
cagggtaccaggagtggcttttgtgtgtgcctgggaggggtacctagtccatgctccagccccatccgtggcctccatggtgcccaactttcctgagaagtatgctctgctcttatttctttagggattatccaggaaagtcatgggtgttggattaaatgctagtctgttttcctagcaagagtccccacaatggtcctctaaaatgatttaccctcagtaactggctagttggtctgctaatcacctttggctagtcgatctgctaattaccttttctccctaagcttaataagattctctttcctttttcctctctgtgcatcagtcagtttttactgcttcaggccctccaaacatactctgatgacatcttgtcttctgaaacacataccaaaattgatcccacttctggcccaaggctcataacccgcaggaagaatctctcttatgcaccaggctatagaagagatgacctcgagatggcagccctggatcctgacttagagaatgatgatttctttgtcagaaagactggggctttccatgcaaatccatatgttctccgagcttttgaagactttagaaagttctctgagcaagatgattctgtagagcgagatataattttacagtgtagagaaggtgaacttgtacttccggatttggaaaaagatgatatgattgttcgccgaattccagcacagaagaaagaagtgccgctgtctggggccccagatagataccacccagtcccttttcccgaacctggactcttcctccagaaattcaagcaaaatttctctgtgtacttgaaaggacatgcccatccaaagaaaaaagtaatagctgtagaata

SEQ ID NO: 350 - DNA, 286 bp, Homo sapiens
  misc_feature: Incyte ID No: 006922.1
agcaaatggagcagctgaaccggcgatatcagagtatccgcagaaccatgaccaatgagaggcctgaggaaaataccaatgctattgatggggcaggggaggaagctgactttcaccaagccagtgcagatttccgacgggagaacatcctgcctcactctacctccagatccaggatcacgttgctgttacagtctccccccgtgaagttcctcatcagcccagagttcttcaccgtgctgcattctaaccctagtgcctaccgcatgtttacaaacaacacgtg

SEQ ID NO: 351 - DNA, 420 bp, Homo sapiens
  misc_feature: Incyte ID No: 333398.5
cttccactcatgtgttgacacccgcgtccaggagaaactcgctccaagtgcatctagcgcctgggacctgagacggcgttggcctttcgtgcatgcaaatccagggatttagaatctccgccacctccctactctcggctgtctcctcgcgacgagtacaagccactggatctgtccgattccacattgtcttacactgaaacggaggctaccaactccctcatcactgctccgggtgaattctcagacgccagcatgtctccggacgccaccaagccgagccactggtgcagcgtggcgtactgggagcaccggacgcgcgtgggccgcctctatgcggtgtacgaccaggccgtcagcatcttctacgacctacctcagggcagcggcttctgcctgggccagctcaacctggagcag

SEQ ID NO: 352 - DNA, 674 bp, Homo sapiens
  misc_feature: Incyte ID No: 235725.21
tgaaatcggggaatcgggcctctgccggcgccctggcagcggcgcggggcgtggctccgggctggattggtggcgcctgggccccgcgagcgcctgcgcagtggtcaaggccgcgctcgcgccgaggggctgcgagagtgaccgcggctgctccagcgctgacgccgagccatggcggacgaggagcttgaggcgctgaggagacagaggctggccgagctgcaggccaaacacggggatcctggtgatgcggcccaacaggaagcaaagcacagggaagcagaaatgagaaacagtatcttagcccaagttctggatcagtcggcccgggccaggttaagtaacttagcacttgtaaagcctgaaaaaactaaagcagtagagaattaccttatacagatggcaagatatggacaactaagtgagaaggtatcagaacaaggtttaatagaaatccttaaaaaagtaagccaacaaacagaaaagacaacaacagtgaaattcaacagaagaaaagtaatggactctgatgaagatgacgattattgaactacaagtgctcacagactagaacttaacggaacaagtctaggacagaagttaagatctgattatttactttgtttattgtctatatgccttttaaaaaaataaacttgttatgcaaaataaaa

SEQ ID NO: 353 - DNA, 515 bp, Homo sapiens
  misc_feature: Incyte ID No: 242472.14
ctggagacgttgcatttgtgaaagatgtcactgtcttgcagaacactgatggataaggtggaacgcctgaaacaggtgttgctccaccaacaggctaaatttgggagaaatggatctgactgcccggacaagttttgcttattccagtctgaaaccaaaaaccttctgttcaatgacaacactgagtgtctggccagactccatggcaaaacaacatatgaaaaatatttgggaccacagtatgtcgcaggcattactaatctgaaaaagtgctcaacctcccccctcctggaagcctgtgaattcctcaggaagtaaaaccgaagaagatggcccagctccccaagaaagcctcagccattcactgcccccagctcttctccccaggtgtgttggggccttggcctcccctgctgaaggtggggattgcccatccatctgcttacaattccctgctgtcgtcttagcaagaagtaaaatgagaaattttgttgatattctctccttaaaaaaaa

SEQ ID NO: 354 - DNA, 1141 bp, Homo sapiens
  misc_feature: Incyte ID No: 253550.20
atcatcaagaaagggcatgctaaagacagccagcgctacaaagttgactacgagtctcagagcacagatacccagaacttctcctccgagtccaagcgggagacagaatatgtgagagcttttcctcttgttaaaggaggagggcaagacctgccaagcctgggtactcagagcctcttgagggcaattcttactcaacaaaccccagcgcctggctgatgggtgggcaacccctagcccctctgtgccctacctctctcctctccttacataaagaatattgacccttttggagaatcttatgaggatcaagctgaaataacactcttaaaagcatatgggatgtcataaagacctctgcagataatgaaaaatattctcataaagatagttttatttacttcatcctctatgcttgttgacctgctattggttccataccagcttctgtgccttactctgggaagagcaaaaaggagacagggagtgatggttagcttattcgggggactttcgtgctacatcagacataaggtatctgaggagcaaattacaggtcccacttttggtagttgtgcagcatcgtaagatttttaaagcacacattctagagtaaaaactgtgactctgttgctctggtccttcctgatccccagggtccctgccgtagagaaatggaagacacactgaatcacctgaagttcctcaatgtgctgagtcccaggggtgtacacattcccaactgtgacaagaagggattttataagaaaaagcagtgtcgcccttccaaaggcaggaagcggggcttctgctggtgtgtggataagtatgggcagcctctcccaggctacaccaccaaggggaaggaggacgtgcactgctacagcatgcagagcaagtagacgcctgccgcaaggttaatgtggagctcaaatatgccttattttgcacaaaagactgccaaggacatgaccagcagctggctacagcctcgatttatatttctgtttgtggtgaactgattttttttaaaccaaagtttagaaagaggttttggaaatgcctatggtttctttgaatggtaaacttgagcatcttttcactttccagtagtcagcaaagagcagtttgaattttcttg

SEQ ID NO: 355 - DNA, 707 bp, Homo sapiens
  misc_feature: Incyte ID No: 216262.3
cagctgcagggctcacattcccagcctcacatcactcacaccttgcatttcacccctgcatcccagtcgccctgcagcctcacacagatcctgcacacacccagacagctggcgctcacacattcaccgttggcctgcctctgttcaccctccatggccctgctactggccctcagcctgctggttctctggacttccccagccccaactctgagtggcaccaatgatgctgaagactgctgcctgtctgtgacccagaaacccatccctgggtacatcgtgaggaacttccactaccttctcatcaaggatggctgcagggtgcctgctgtagtgttcaccacactgaggggccgccagctctgtgcacccccagaccagccctgggtagaacgcatcatccagagactgcagaggacctcagccaagatgaagcgccgcagcagttaacctatgaccgtgcagagggagcccggagtccgagtcaagcattgtgaattattacctaacctggggaaccgaggaccagaaggaaggaccaggcttccagctcctctgcaccagacctgaccagccaggacagggcctggggtgtgtgtgagtgtgagtgtgagcgagagggtgagtgtggtcagagtaaagctgctccacccccagattgcaatgctaccaataaagccgcctggtgtttacaactaattgatcac

SEQ ID NO: 356 - DNA, 465 bp, Homo sapiens
  misc_feature: Incyte ID No: 235191.3
  unsure 107, 111: a, t, c, g, or other
agagatggcataaccccatctatatctcatatatatacacatatatgtgtgtgtgtatacatatatatgtgtgtgtgtgtatgtgggcatatatatatatatataanattnaggggaaagctcacccactgacctttgctatgcccaaaagtgtactccacattccaacaaatgtgttttctccccagatgtctggcgataaagggatttctgccttccctgaatcagacaaccttttcaaatgggtagggaccatccatggagcagctggaacagtatatgaagacctgaggtataagctctcgctagagttccccagtggctacccttacaatgcgcccacagtgaagttcctcacgccctgctatcaccccaacgtggacacccagggtaacatatgcctggacatcctgaaggaaaaagtggtctgccctgtatgatgtcaggaccattctgctctccatc

SEQ ID NO: 357 - DNA, 908 bp, Homo sapiens
  misc_feature: Incyte ID No: 480337.45
aaaggaccgctacagatccgactctatgtcagtttcttggctttgttgtagagggaatccactactttgctcatgttctgaattgtttccagagcagcttcgggggacgaaggggtagttctttcacctcggctgggcgcctagaaaagcctagaaacagctccttttttcttccgcctccgagtcttcgcgtcagcgtcctgcgcagggcccttggggcgaatcgcggtgcgcgtcggggcgaccgccctccctccctgggaggggcgagggggctagcggcgacggctggggcgagcgcgcctgcgcgctgggtgattttttcacgtgtcgccagggccggactgcgagtctctttgcggcgctacactagagcagagtacgagtctgaggcggagggagtaatggcaggacaagcgtttagaaagtttcttccactctttgaccgagtattggttgaaaggagtgctgctgaaactgtaaccaaaggaggcattatgcttccagaaaaatctcaaggaaaagtattgcaagcaacagtagtcgctgttggatcgggttctaaaggaaagggtggagagattcaaccagttagcgtgaaagttggagataaagttcttctcccagaatatggaggcaccaaagtagttctagatgacaaggattatttcctatttagagatggtgacattcttggaaagtacgtagactgaaataagtcactattgaaatggcatcaacatgatgctgcccattccactgaagttctgaaatctttcgtcatgtaaataatttccatatttctcttttataataaactaatgataactaatgacatccagtgtctccaaaattgtttccttgtactgatataaacacttccaaataaaaatatgtaaatgaaaaaa

SEQ ID NO: 358 - DNA, 1966 bp, Homo sapiens
  misc_feature: Incyte ID No: 199939.6
  unsure 1919: a, t, c, g, or other
cagcagtgaaaatctagtattcatccaggacatcgggggcgccatgaggatcctgggcactccttctgaggtatttcttcatatttccttcccctctggaattctgttctgcagccttcagtcacttcagactccctgaactccaatctctgtctcctcgactcagcgagtggctgtgctccacttgggctccctcccgtgcctgtggttgcaagatgcctctgaggagctgtgcccaagtcacctggcatccgcacatccctctggtgaggtgaggtgggaccaggcacgctgggcacaggagagcctgtgaggagtgcatcccagcctgtttgcatctgtggtctgcctcttttcctcatcagagaggacacacaggtaaagcagaggtacaggtcaccctcactgtgccgccccgggcaggtcaggtgtggtctcaggtctcagcaccctgaaagaggaaacatcacgggcgtagtatgggcctggttttggtcacggggtccacatgacgtcacgttcttgagtcgcctgttgtgatgataggcaggaacactgttgccgtgggcagagcgacgcgtgcgggttgtgtgtgtgagtcaggaaggccgtcgccacgggcagagcgacgcgtgcggggagcgtgtgtgagtcaggagggccgtcgccacgggcacagtgacgtgcgtgtcagatcatataccctcgccagcagctgctgaccctccgagagctagagatgattggcttcattgaaaacaacgtgtcaaaattgagccttcttttgaatgacatttcaaggaagagcgagggcctcagcggccgggtcctgagaaaactcccctttctggctcatgcgctgtatgtccaggcccccaccgtcaccatagaggggttcctccaggccctgtctctggcagtggacaagcagtttgaagagagaaagaagcttgcagcttacatctgatcctgggcttccccatctggtgcttttcccatggagaacacacaaccagtaagtgaggttgccccacacagccgtctcccagggaatcccttctgcaaaccaaacgttacttagactgcaagctagaaagccaccaaggccaggctttgttaaaagaagtgtattctatttatgttgttttaaaatgcatactgagagacaaacatcttgtcattttcactgtttgtaaaagataattcagattgtttgtctccttgtgaagaaccatcgaaacctgtttgttcccagcccacccccagtggatgggatgcataatgccagcaagttttgtttaacagcaaaaaaggaagattaatgcaggtgttatagaagccagaagagaaactgtgtcaccctaaagaagcatataatcatagcattaaaaatgcacacattactccaggtggaaggtggcaattgctttctgatatcagctcgtttgatttagtgcaaaaatgttttcaagactatttaatggatgtaaaaaagcctatttctacattataccaactgagaaaaaaatggtcggtaaagtgttctttcataataaataatcagacatggtcccatttgcaggaaaagtgcagactctgagtgttccagggaaacacatgctggacatcccttgtaacccggtatgggcgcccctgcattgctgggatgtttctgcccacggttttgtttgtgcaataacgttatcacatttctaatgaggattcacattaatataatataaaataaataggtcagttactggtctctttctccgaatgttatgttttgcttttatctcacagtaaaataaatataattaatggtttgcatgtgaaattcacttttgaaagaacatgttaccttaccttttgttttagaagttttcaagtattaaaatattttttagaattttcttgtnttgattctaagtatctcttccaagtgcttttaattttactaaaaatt

SEQ ID NO: 359 - DNA, 678 bp, Homo sapiens
  misc_feature: Incyte ID No: 201204.9
gttaaaattctggctctgtcatctactaaacttgaatgtgacctttggcaacctattgaacttccttctgattgattcctcatctatccaatggataatacagatgctccctgatttaagtcccagtaaacccactgtaaaggtaaaaaatggttacatcagcgagtgtctataatttgcctctcaaggaacttttgtatggactatgatcattcaactctgagtctggagcatgtggcagggtgcctaacactagaatgggctcagttctgatttaagtagccttggctatatgtcatgcccacaccagctcctctccacaggtgtgctccatcctctggtctccccattacaaggagctcatctcaggccatggctttgcacagaaccagctagttatttggaagtacccaaccatggccaaggtggctgaactcaaaggtcacacatcccgggtcctgagtctgaccatgagcccagatggggccacagtggcatccgcagcagcagatgagaccctgaggctatggcgctgttttgagttggaccctgcgcggcggcgggagcgggagaaggccagtgcagccaaaagcagcctcatccaccaaggcatccgctgaagaccaacccatcacctcagttgttttttatttttctaataaagtcatgtctcccttc

SEQ ID NO: 360 - DNA, 728 bp, Homo sapiens
  misc_feature: Incyte ID No: 201887.2
  unsure 723, 725: a, t, c, g, or other
gttgatttaatactattttaagaacattttaatatatttgttctacactcaaaaatgtaagccttaaatctttaaaaagaaaaaaatccttaaaaaacaagtatttaccattgaatgcctatggaaaatcactaagagaaacatacctgccaattctctgataacttcttctctattcacatgactgttatttcgagatttgtacacaatctgaaatgtccctttgtttggagctttaaaccagggttccaaaaatgtttctgcatattttttcatatcttctaaaaaagccttgcatgtgcctgagatgggtaacattcgcaaaataactcgagtcttctttttcttggttttgtacatatcctggagaatatgatgcaccaatttctcaggctcttaagaaaaaaaaaaagttaagaagataatttctcagacatcttaaagatcgaactctaaaatgaattttcactggcaatgacataagttgacagaagaaattctcataatgaattttaaatgaatctacctagtcattctttccaaacagtatttcttcagtgcctaatacgtactataacgtatctaatatattttaacttttcatcattattactgcttgcactagaaatgactgtttaggtagacaccgttgttaacatttttgtgatgtcctgagttatccaaccgtaacaccatgctgttgttttcctgtaacaacagtgncntta

SEQ ID NO: 361 - DNA, 4025 bp, Homo sapiens
  misc_feature: Incyte ID No: 1136056.1
cattcataagactcagagctacggccacggcagggacacgcggaaccaagaacttggaaacttgattgttgtggttcttcttgggggttatgaaatttcattaatcttttttttttccggggagaaagtttttgggaaagattcttccagaatatttcttcattttcttttggaggaccgacttacttttttttggtcttcttttattatacttttccccttttcccccgcgtgggacccgccggacgccgtggaggagaccgtagctgaagctgatttcgtgttacagcgcgtgtgcaccaagacgctttctgcccctgggggagcaacccctccctcgcccctgggtcctacggagcctgcactttcaagaggtacagcggcatcctgtgggggcctgggcaccgcaggaagactgcacagaaactttgccattgttggaacgggacgttggctccttccccgagacttccccggacagcgtactttgaggactcgctcagcgcaccgtgggactcccacgggctcaccccggacttgcaccttacttccccaaaccccgggccataagccttggcttcccgtgcgacctcagcgtggtcaccaggtggcccccctgtggcccagggaaatgtttcaggctttccccggagactacgactccggctcccggtgcagctcctcaccctctgccgagtctcaatatctgtcttcggtggactccttcggcagtccaacccaccgccgccgcctccccaggagtgcgccggtctcggggaaatgcccggttccttcgtgcccacggtcaccgcgatcacaaccagccaggacctccagtggcttgtgcaacccagcctcatctcttccatgggcccagtcccagtgtgcagccactggcctcccagcccccggtcgtcgaaccctaagaaattgcgggaaaccagttactccacaccaggcatgagtggctacagcagtggcggagcgagtggcagtggtgggccttccaccagcggaactaccagtgggcctgggcctgcccgcccagcccgagcccggcctaggagaccccgagaggagacgctcaccccagaggacagaggagaagcgaagggtgcgccgggaacgaaataaactagcagcagctaaatgcaggaaccggcggagggagctgacccgaccgactccaggcggagacagatcagttggaggaagaaaaagcagagctggagtcggagatgcgccgagctccaaaaggttgaggaacgtctggagtttgtggctggtggccccacaaaccgggctgcaagatcccctacgaagaggggcccgggccgggcccgctggcggaggtgagagatttgccgggctcagcaccggctaaggaagatggcttcagctggctgctgccgccccgcgccaccaccgcccctgcccttccaggaccagccaagacgcaccccccaacctgcacggcttctctctttacacacagtgaagttcaaggtcctcggcgaccccttccccgttgttaaccctttcgtacacttcttcgtttgtcctcacctgcccggaggtctcccgcgttcgccggcgcccaaagcaccagcggcagtgaccagcctttccgattccctgaactcgccctcccttccttcgctctgtgaactctttagacacacaaaacaaacaaacacatgggggagagagacttggaagaggaggaggaggaggagaaggaggagagagaggggaagagacaaagtgggtgtgtggcctccctggctcctccgtctgacccttctgcggccactgcgccactgccatcggacaggaggattccttgtgttttagtcctgcctcttgtaatctgtgccccggcgaggacggagagctggtgactttggggacaggaggtgggaaggggatggacacccccagctgactgttggctctctgacgtcaacccaagctctggggatgggtggggaggggggcgggtgacgcccaccttcgggcagtcctgtgtgaggattaaggcgaccgggtggctgcgaggtaggctgtggaggtgggctggagtcactctccagagaggctcaacaagggaaaaatgccactccctacccaagtgtcatcccacaccccacccgattttcggggtgcctaggattggtgttcccccgcactccacgaccttagcttattgatcccactatttccatggtgtgagatcctctttactctagggcagaagtgagcccccccccttaaagggaattcgatgcccccctagaataatctcatccccccaccgcgacgttctgtttgagatgtgaacgtccttccttgacctgtctagccactccactccccagaaataagctggctctgtattggtatttctggcctcgctaagggctccccacccctgattaagtcatgcccctcatggccttgctttctgactgacatgtgttttcctcagtggatccctgccaccgcgtgccagccgagcccgctgcgtggccttcctcgttgggccgcttctgatttcatgcgcagtcagggtgctgctgtgaatgccgtcctgctgggagtgatttataacctgtgaaatgagttggccagattgtgggggtgcagctgggctggggcagcagcacctcatggggggataaatgtccgcgcacttcctcgaaagccgtttcctgcggtctcccgttcgcgtgcatcccccgttcttcctcccctcaacagcagagttagactcaatgggggtgacagaaccgacgaatgggggtgacacgtcctcgcaatgccactgtcggcctcgtcgtctctcgtcctcaggacccgtcatgccctcgagcctgtgtcttcgtttaatggtcccccgacctaatccccagcactaggacgccaacttctcaccaccccttggcccctcacatcctctacctggaagggagtgaggggctgtgactattttttctcggacaagatgtcatatgctgagtgcttcggtaccccacaaaacccacaatatttttggactggcagactcaaggggctggaatctcatggattccatgcccggattccgcccatccctgaccatggttttggctctcccaccccgccgttccctgacgcttcatcttcatggagggatttctttatggaggcaaatttatattttttaatatcggggggtggaccacgaccgccctccatccgtgcctgcatgaataaacattccacgtgcccctttttcgcgcgtctcccatcctgattccaagacccatttccttagctaattaatcccttttcctgggtttccggaaaggcaattatatctattatgtataagtaaatatattatatatggatgtgtgtgtgtgccgtgcgccgtgagtgtgtgagcgcttctgcagcctgcggacctaggttcacgttgggccctcaaagcgagccgtgagaattgggaaactgcttctaggaaactctggcttcaaccctgtctcgggctgacccttttctgatcgtctcggcccctgctgattgttcccgatggtctctctccctctgtcttttgtcgctccgcctgtgtccatctgacccgttttcacttgtgctcctttctgactgtccctgccaaatgctccagctgtgcgtctgacttctgggttcgttggggacatgagattttatttttttgttgagtgagactgagggatcgtaagatttttacaactctgtatctcttgacaacttctgggtgcgagatgtgatgagatgtgagacagggcttgactcatgactcaacaacaaatcaaatgaatcccgacaccacccatccaccaatgaatgtacttgatgattctctttatgtaattttgcatctgacccccggggggtctggggacagattggcaatgggaccgtcccctctaaaccttgcccctcgccctcgttgccaattaaaaagctcttaaaaacgcaaaaaaaaaggatttaaaaaa

SEQ ID NO: 362 - DNA, 272 bp, Homo sapiens
  misc_feature: Incyte ID No: 994977.1
tatgaagttgatgctactctgaagtctctcaacaaccagattgagacccttcttactcctgaaggctctagaaagaacccagctcgcacatgcgccacccagagtggagcagtggttactactggattgaccctaaccaaggatgcactatggatgctatcaaagtatactgtgatttctctactggcgaaacctgtatccgggcccaacctgaaaacatcccagccaagaatggtataggagctccaaggacaagaaacacgtctggctag

SEQ ID NO: 363 - DNA, 1026 bp, Homo sapiens
  misc_feature: Incyte ID No: 888669.8
ccaggagggagcggcctttgctcagcgcgagacggctgggcgccgagtgggacagcgctggtgcggagactgcttccggactccaggtaccgcgcttggcggcagctgggccccagacttctgtcttttcagctgcagtgaaggctcggggctgcagaattgcaaccttgccaatggacctgatcggttttggttatgcagccctcgtgacatttggaagcatttttggatataagcggagaggtggtgttccgtctttgattgctggtctttttgttggatgtttggccggctatggagcttaccgtgtctccaatgacaaacgagatgtaaaagtgtcactgtttacagctttcttcctggctaccataatgggtgtgagatttaagaggtccaagaaaataatgcctgctggtttggttgcaggtttaagcctcatgatgatcctgagacttgtcttgttgctgctctgagcatctggaggaacagaaaactaagttcatgtcatcctgctgtaatgggcagagcatattttttttgtatttaaaagataaacttcaatatggaatgctagaaacacaaatagcactgtcacctctaatatgaacattagtttgaggtagtttttttctaaagcaaaaattttaactgttttctaattgtcaagcactattttcattaaaagtgtctaatgaatcatgatatactcttccatttgttgtgtctattttttatatatttggtattttttgaaaattccaaatactcatgtctcaagtaagcttaaactacaacttgtcacataaaggaagtcttaagtggagttcacagaatgataatgtatctatttgtcatttgtgttatatttgaaattattagaaattatgctttttccattttaattgtattgctgccagtgctatttttttctttaaaaaattttattcttagcacactgttatgtcctaactgaatgtattcagtattcaaataaaagacattttggttcaaaaaaaaaaaaaaagg

SEQ ID NO: 364 - DNA, 1735 bp, Homo sapiens
  misc_feature: Incyte ID No: 345860.20
ctggaaactcctggctttccatcgaaattctccatgagaaatgttttttcactttccaaaaagccatccatgcagcacagctttaaagcctcccgggcttgcagtgttcctggagcctgccaagtgctggatgtttaactagcatcaggagctgcttctggccatccatgctgctctgggcctctagcccctagcttgaggcaaaaggctgtactgtgaaaggagtggggaggtgacaggccatgtgtttctgtctcggtcctgtttccacagtatgacgaggaagcgatggtggaggctgtggccctctacaaccctgtgagctttgcctttgaggtgactcaggacttcatgatgtatagaacgggcatctactccagtacttcctgccataaaactccagataaagtaaaccatgcagtactggctgttgggtatggagaaaaaaatgggatcccttactggatcgtgaaaaactcttggggtccccagtggggaatgaacgggtaagcagctcccaggtcccacttctgggagggggatgttgctcaggcctggaggccctgggggcatcacttccacctcagagttacggcttccacagacgagctggtcagccaagccctaggccaggccagggggaaagggagcatgagaatgtagcctccacatttccaagcccccatttgcagccctcacagggccccaggtctttaggacgctgcagggagagcaggaggccagctggctcagaaggactgctaggaaaacagctcagaacttggaactctgctggcacgaaatcagtgtctgggagggtccgtctttgagaaatcaaagcaacaaatgtacccctgatcactgacagcccctccttccgggagaaaaggctggcatggggcggcctgggtgtatatgctgctgtgcctttgtcctgtcctcccagattccatgtccttgtctgaaaaggagagctttcctgttccctcgggctcctggtgataaaatagctgtgtgagggcccggccagggctaagagggggccctcggtaaattttcgggagaagtgggatatggatcattcatttggcagctaaggagagggaagaatgaattcttcacaaagtcaggtccgtgatttgccggtgatcaaataagccgaatgctactgttttatgaataaatttagagggtctcacccctgaagtcagctcttggtgagcagcaaaacattctagaaaggcctgtggtggggagaccgccggccgggcctcagctcctctttctgcccaggtacttcctcatcgagcgcggaaagaacatgtgtggcctggctgcctgcgcctcctaccccatccctctggtgtgagccgtggcagccgcagcgcagactggcggagaaggagaggaacgggcagcctgggcctgggtggaaatcctgccctggaggaagttgtggggagatccactgggacccccaacattctgccctcacctctgtgcccagcctggaaacctacagacaaggaggagttccaccatgagctcacccgtgtctatgacgcaaagatcaccagccatgtgccttagtgtccttcttaacagactcaaaccacatggaccacgaatattctttctgtccagaagggctactttccacatatagagctccagggactgtcttttctgtattcgctgttcaataaacattgagtgagcacctccccagatggag

SEQ ID NO: 365 - DNA, 1195 bp, Homo sapiens
  misc_feature: Incyte ID No: 480337.43
ggccggactgcgagtctctttgcggcgctacactagagcagagtacgagtctgaggcggagggagtaatggtgagtcccgcgtggccccgaggcctgcaggcccgggcctgtctgaggcgtacggggatccctgacgcccctcttttgttgggctgggcgggagggattggtggccactcagtgaccagcgcccgatggcaccttggagcggcaaggcccgcccgacccttttctcccccagggctctttgcacgcgcgtgtgctgccggtgtgtaaggcaggggggcgagaacccgggcgcacgcgcagcgtctcacctgcttctgcagggcctttgtggatgtgtaatatcttgggtaaaaatcatggtgccaggcagggagcttgacccagcgtttcctgaaaatttctggaaaaacctgaagaaggaaaacatttgaccttggaataaactaaggttgaccttaaagctggtctggttgctcaccggaggagcgacaacgacccctaacagacgtaaggaatcgggaattaaacttggaatattggttagtacattcaaatgcgcttccttaacgaataagctgaggtttggtgttaactttcaaagccaaaacgtgttgagatgtatagcacggtggcgttgcctgttgataatgtgattacatttagtttttgtttcaaaacatttctcttcctacaggcaggacaagcgtttagaaagtttcttccactctttgaccgagtattggttgaaaggagtgctgctgaaactgtaaccaaaggaggcattatgcttccagaaaaatctcaaggaaaagtattgcaagcaacagtagtcgctgttggatcgggttctaaaggaaagggtggagagattcaaccagttagcgtgaaagttggagataaagttcttctcccagaatatggaggcaccaaagtagttctagatgacaaggtgtgtaaacttaataattctaaaaagaagtcagatatttgcaattagttgtcttaactaatggtttttttcacttgcaggattatttcctatttagagatggtgacattcttggaaagtacgtagactgaaataagtcactattgaaatggcatcaacatgatgctgcccattccactgaagttctgaaatctttcgtcatgtaaataatttccatatttctcttatataataaa

SEQ ID NO: 366 - DNA, 824 bp, Homo sapiens
  misc_feature: Incyte ID No: 399300.14
cttaaatattacttgtttaaaattttttatattatgaaattaacataaggtttacttggggaaaaatatcttaataaataattgtcaaatattaaagttgctttaagcataaagttacaatattatcagtctattcatattattcttcaaaatttaggatttgttaatacacaaatgctctaaaattttaatattataaagtcaattttcaggtaataactttttgttaccttcttaacaattaattttattttagaggagaggggccactgaaaacttcccaggatttaattcatcaactagaggtttttgctgcagagggtttaaagcttacttccagtgttcaagctttttcaaaacagctgaaagacgatgacaagcttatgcttctcctgggaaataaacaagctaattcctctatgccaccagctccagacagtaactaagacttctttgcagaataaagtatttctaaaggttgacaagtgtattacgaagacaagatccatgatggctctcttagtccaacttctttcactttgttataaactgctgaagaagagtgaaaccagatactaattgtcttaactctttccagcttcagatggaaaataacggatgggtctcagttacaaataaggacactatggatagtaaaacttgagaagcttttggggtcagatctctggaacatcatgtgatgaagctgacatttttaaaaatcaaatgatcctttatcttttcagaaattcatcaattttataaagaaaacaatattgaaattttgctctattttctgatcatgaaactgattgtaaagcttt

SEQ ID NO: 367 - DNA, 538 bp, Homo sapiens
  misc_feature: Incyte ID No: 368015.2
gcgactgagcaccatttctgcaaaaagtaaagatggccttgctgagagatcttttgtctctgtgctgacttttcttcacggcactgattatctttttctaacaattttggtggcaattgtatggggatatactttcctccaggggcgtctctagtcctctctcacgagggggcactccgctgcctcttgcagtggcctcaggggtaagggaccgagacccatccggtgtgaccaataaacccggactctcagcaatgtggaaagaaactggccaacaacctggggtaaaggatcctcacataccgaggtgacgactctgtgcacagaccaacgaaggagaagccacgggagccggtgttatgtcgtaccatacatccaggagttcatcaaaacaactaagccaagacatgctaagaaagtttgaagaggaaaactatacagtaaaagaggagggaattgtaggaagtaaaaagtttctgcttcaaagttccccttcttgttaaagaataaatcataagtcttagaaattatagattct

SEQ ID NO: 368 - DNA, 2319 bp, Homo sapiens
  misc_feature: Incyte ID No: 227550.1
  unsure 68, 2256: a, t, c, g, or other
attacattttgtttctcccatctctcaggtagacttacactttcggcccagcacatcagtcatcgccnttgcttgctttcctattcactcctgttctggaaggtgcaccaccttttcttggaaggcttcccttgctctcccaggctagatgagatgtccttccatcagttcccacagcaccctgtgcatgtatctgttgtgcacttaccaatagtatacaagggatctatgacccaagtctctccccactagcttgtaagctcctcacagacaggaaccatgttttgtctttgtactccagtgcctagtatataagagatactcaataaataaatatttgtcaaatcaactaattgattccttgtgacctaattctagagaatgggaagaaggcctgttattttgttgtcctttatggttctttaggaaagctctccaagcttggcatttgtcagggtgggaggaaaactgttgaagtattaagactggacacatggctgctaattcatcagcttatcattgaaaaagtccatagccaaaacctgactgtgcacttactataggaccctgacctgcctgggtctccctgtctctccagccagtatatttaaaggtaatgagataatgatgagtgttttgaaaaatgtttagtgttcaaatagaaaccattcgtgtcccttcactctctgaacatagtctgcaaatctctccctctctggtatgtttctgttttgtggattagactgctaaataagcgaagagttaattttgaagttcaggtcaacaaattcctgtttggagacgggctgttcctgaataccaggttgttatctgtctattacagccccttcacttctgggctcctggccctttgcaaagtacttcagaaagcctagagagaagagagggccctcaaatcccattccagcccctaaatgaaagtggcatcacaaggagaaaagtggaggtagaaatgtaccatgggggacgttgccccattgcctttcttcccctgactactgggcttcctctatcagcttttaacgtctggaagtagctgagtctccagtcactggtggccttccccaagtgagctcagcagcatgtgctaataggtgccaatactgtgctggctccagtgggattcctctctgcaaagctgctggcttagcttgactgtttccctattcctctccttagaactttcatagccagtcaagcatagaattgcatccattcttctgaaataggtactgtgcctaatttttcattggcttggccaagattctgttacctgtaattatgtcatatgggctgactggtgtaggtttggtaggcctcactgctctccagaggctagtgttcctatcccaggatggctgttgggattaggagtggaatgaggaatagtttaggaccacaagagatttggcctccttggaacatgtaggaaggcctcaaggatgtaattctagcccagggaagaaaatccttttcagcagacgcttcccttcccttcccctagggaatgtgtccctactatagtaaactcttccttaagagagttttatgttttctctgtcagatcaatttgtttttcttaatgttgttcctatcaaaaaaaacaaattgatctgacagagaaaacgaaatacagtcctcagacctgacagtttcatttttccccccaagtagaagcaatagaaaccttagcagttccaagactcctggcactcacttttcctctccatctttaggtctaacccagctcagcccagagtaaagacataaaagcctcacatgtgatttcctcttgcattttttctgctagaagggtccacagtacttactttatgcctcatctcaattgaagctggatgatgaggatagtgggcagtgattgcaattggggaatgcatgtactggatcacataaggtcatgaaagtccttgaaacagagccttgccaagcagaacccttgccactcatggtattcgatacagtctacccatctgacatgaaatgatattcttaatgagccattcctatggaagatagctattgccaggcacattcagtctcctggtctccctctcatagctatgtagggcctatgacctagaataaatggaaaaatgttatcaggaggaagagactgctggactcccctgagaggtagggtttgtgctaggagagctgggtgccatttatttcattttgatatatcaggtgctcctagtaacaattcctagtttntcttacctctgtaatcatcctgaatagtcactgcttcttgagctttggtgagtgttctctaaa

SEQ ID NO: 369 - DNA, 848 bp, Homo sapiens
  misc_feature: Incyte ID No: 201906.6
cacagactagacctgaaggaattccaggctcagctcataaacctaacagcatgcttcgagactgtggtaatcaggctgtagaagaacgactacaaaatattgaggcccacttgcggttacagacaggtggtccagtgccaagagacatttatcagagaattaaaaaacttgaggataaaatccttgaattggaaggcatctctcctgaatattttcagtctgtagcctgtgaacatacatgacacaagccctatgggaaagaagatttcatactcatcacccttctataataggatgaatgagccatctttaggaacctcacttggaatacagtcagctctaagagtgtccttgcaaacaggagaagttgagcacataccttacagaggacatagtaccatttattcatcaccctcaccatcatgctgggagtacatgcatgagcttttctggaaaaagaagaaaagttcaaccacctcaaaactattcactggctgaacttgatgagaaaattagtgccctcaaacaagccctcctcagaaaatcaagagaagcagaattcatggcaacccaccaccttccatgaaaaactcctctcgtccttgtcattttacttttttgtatacatatgtgtaacttacactgttattaattcaacggatatatatttatcaatgtagacttctctgtgaagtcaaggtttattttcacatgagtccagcttgcagcaagtaatcttcaaatattccagtaagttttgaaataatgaatgcattgaaaatagcattgttggaatttattcccttctgttttaaaggaggtattttggaattgaaaacttaatttac

SEQ ID NO: 370 - DNA, 552 bp, Homo sapiens
  misc_feature: Incyte ID No: 349589.10
ccgggagcactcctacgtcctgtcagcggccaagaagagcactggtcctacccaggagacacaggcaccgtttatcgcgaagagggtggacggtggtggaagaggacgggccttctgagaagagccaggacccacctgctctggcaagatccactcctggctcaaacagctcaagaggtgaggaaattgtccgcctgcagatcctgacacccagggcaggactccgcctggtggccccagacgtggaaggcatgaggtcttccccaggcaacaaagacaaggaggccccctgctccagagagctccagagggacttggctggtgaggaggctcttcagggcccccaacacagatgctgcaaggtcaagtgcacagttgagtgatggcaatgtgggatccggagccacgggctcccggcctgaaggcttggctgcagtagacatcggctccgagagaggaagctccagtgccacttcagtctctgctgtccctgctgataggaagagcaacagcacagcagcccaggaggcatgcaaaggcagaccaaagggg

SEQ ID NO: 371 - DNA, 2032 bp, Homo sapiens
  misc_feature: Incyte ID No: 3713867CB1
cggctcagtggccctgagaccctagctctgctctcggtccgctcgctgtccgctagcccgctgcgatgttgcgcgctgccgcccgcttcgggccccgcctgggccgccgcctcttgtcagccgccgccacccaggccgtgcctgcccccaaccagcagcccgaggtcttctgcaaccagattttcataaacaatgaatggcacgatgccgtcagcaggaaaacattccccaccgtcaatccgtccactggagaggtcatctgtcaggtagctgaaggggacaaggaagatgtggacaaggcagtgaaggccgcccgggccgccttccagctgggctcaccttggcgccgcatggacgcatcacacaggggccggctgctgaaccgcctggccgatctgatcgagcgggaccggacctacctggcggccttggagaccctggacaatggcaagccctatgtcatctcctacctggtggatttggacatggtcctcaaatgtctccggtattatgccggctgggctgataagtaccacgggaaaaccatccccattgacggagacttcttcagctacacacgccatgaacctgtgggggtgtgcgggcagatcattccgtggaatttcccgctcctgatgcaagcatggaagctgggcccagccttggcaactggaaacgtggttgtgatgaaggtagctgagcagacacccctcaccgccctctatgtggccaacctgatcaaggaggctggctttccccctggtgtggtcaacattgtgcctggatttggccccacggctggggccgccattgcctcccatgaggatgtggacaaagtggcattcacaggctccactgagattggccgcgtaatccaggttgctgctgggagcagcaacctcaagagagtgaccttggagctgggggggaagagccccaacatcatcatgtcagatgccgatatggattgggccgtggaacaggcccacttcgccctgttcttcaaccagggccagtgctgctgtgccggctcccggaccttcgtgcaggaggacatctatgatgagtttgtggagcggagctttgcccgggccaagtctcgggtggtcgggaacccctttgatagcaagaccgagcaggggccgcaggtggatgaaactcagtttaagaagatcctcggctacatcaacacggggaagcaagagggggcgaagctgctgtgtggtgggggcattgctgctgaccgtggttacttcatccagcccactgtgtttggagatgtgcaggatggcatgaccatcgccaaggaggagatcttcgggccagtgatgcagatcctgaagttcaagaccatagaggaggttgttgggagagccaacaattccacgtacgggctggccgcagctgtcttcacaaaggatttggacaaggccaattacctgtcccaggccctccaggcgggcactgtgtgggtcaactgctatgatgtgtttggagcccagtcaccctttggtggctacaagatgtcggggagtggccgggagttgggcgagtacgggctgcaggcatacactgaagtgaaaactgtcacagtcaaagtgcctcagaagaactcataagaatcatgcaagcttcctccctcagccattgatggaaagttcagcaagatcagcaacaaaaccaagaaaaatgatccttgcgtgctgaatatctgaaaagagaaatttttcctacaaaatctcttgggtcaagaaagttctagaatttgaattgataaacatggtgggttggctgagggtaagagtatatgaggaaccttttaaacgacaacaatactgctagctttcaggatgatttttaaaaaatagattcaaatgtgttatcctctctctgaaacgcttcctataactcgagtttataggggaagaaaaagctattgtttacaattatatcaccattaaggcaactgctacaccctgctttgtattctgggctaagattcattaaaaactagctgctcttaaaaaaaaaa

SEQ ID NO: 372 - DNA, 717 bp, Homo sapiens
  misc_feature: Incyte ID No: 235943.27
  unsure 685-686, 688, 697: a, t, c, g, or other
catgacaccgggcacccagtctcctttcttcctgctgctgctcctcacagtgcttacagttgttacaggttctggtcatgcaagctctaccccaggtggagaaaaggagacttcggctacccagagaagttcagtgcccagctctactgagaagaatgcttttaattcctctctggaagatcccagcaccgactactaccaagagctgcagagagacatttctgaaatggctgtctgtcagtgccgccgaaagaactacgggcagctggacatctttccagccccgggatacctaccatcctatgagcgagtaccccacctaccacacccatgggcgctatgtgccccctagcagtaccgatcgtagcccctatgagaaggtttctgcaggtaatggtggcagcagcctctcttacacaaacccagcagtggcagccacttctgccaacttgtaggggcacgtcgcccgctgagctgagtggccagccagtgccattccactccactcaggttcttcagggccagagcccctgcacctgtttgggctggtgagctgggagttcaggtgggctgctcacagcctccttcagaggccccaccaatttctcggacacttctcagtgtgtggaagctcatgtgggcccctgagggctcatgcctgggaagtgttgtggtgggtgctacnnangaggactgncccagagagccctgagatag

SEQ ID NO: 373 - DNA, 3475 bp, Homo sapiens
  misc_feature: Incyte ID No: 241742.1
  unsure 1968: a, t, c, g, or other
gaaactgcagctgcttgaatgccttcccagcccctccttctccctccctccctccggcccccccttcctcttttccattgtctttggctctcacaggagctagctgcctgggaggaattgttaactgagtaccagggtacctttaaagaagacccttggagtcttctataccttcttctccttccccatctcactccaccccactttgtccctgatgtcttggggaaggtgtagaacaccctagcagttcctattgtatatacttgggagccactgagaacagaggacggccagtgagtccaagcctcgttcctccttctgcctccccggagccacaggatggatttaggagccactgctcagtgcacttctcccttccaactgcatcaactaactctcgggggtgttctgctcaccacaccgtccttcggttcttactgagtcacagactcgcctgcccactacgtgtcctgggttctctctactcagatcccttccagaaactttatatgggtagaggaagccagggcggcaaatgcgagaccaaatatcattttgccaatgagtctgaggctgtggtctctggatccagtcattatgtttttatagaataattaaaccggatgctaacggtgttttaaaaaataataataaaacaacttgtttccttttggccacccccaggaagggctgatttcaaaatctgggggcgagcaacctcaaggaacacaatttccctccctatcaacaagaggattttaacagcaaagaagagaggcagcacctcccattggcagaatgaccgctgagccaggctgggtttgggtttcttctcttctgattctgctgctcactgtcatagccttttgtgtatagtgatgtgtctgtatctttaatgtaaatagagagatgatgaaaaaagagtctattttagtgttaggaagccccagcaggggagtcggaagagcttggaagagctggggagagggtaggggaaaggtttttccaggggccactgggtttgagccctgcttctgtgcacagccacaccaccctctcccgacagccctcaaagacgtagcaactctttctctcaaggtgctaaaggactcagaaggtgcagcacgtccagtgggtaggtacttgttgcatgcaaaagctgtagtgtatctggtccttcctccccagcttttgtgtggggttcttgctttgtgtggtattttgttttcccctctaatgagagggcatggcctgagtcagaagagctaccccaggtgaaactggaagtgcatgaggcagagcgtccgtagcatttccagtttgttctgtataggaacagaggtgcctccgggaaggaggcagcgaggtaggtagctatgataggcacctaatgcttctcaaggacttattttttccttcttgaagactagtagtaacatcttatgatttagagtaagttgattgtaaccataggtatttattgattggaggaagggagggtcatattattttcggctttatttatgtaacatttgctagcttgtaaaaggcgaatgtgaaatattgcatctgcattttccaaggctgattcgtgtagctacccttgccacagttgtgacggatgtatggatgttcttgaacatttcagaaggagtggtagaaaaaaacacacattcagccaaccacttatatgaattgaatgtatcagaagtgtactgaagggactggagatggttttcctcagatgagggggccccaaaattgatagtgcacatctgcacgctttctgcgaggcctcagaacttttcccagggcccctccctcaaattgtctccatgggaaacttgacccagtggcaagttgcactttggtgatcttggtggtctacacacccgttctgtggagagtcgatttacataagctgtgtatacacacacacacacacacacacacacacacacacacacncacccctaccccacactgactgtctaccgacaaagaccctatttcctggcaaacggcctcctgaaccctgactttttgtgtacatacttgtaaacacggatttttctgggttttggtttgctttttccttttgtccccctgcccctgttctagcttgttcttcttggtttgctttcaacctgcttgatggatgtctgcagagtgctctctaagagtccacctcagtgcctcgtgtgctcagtggtcatgggaaggagcgaaggaaccatccttggttctcccagcttggttgtgtagcaatccctcagcattgtttttctcagcttcttggcaaaaattaaaacaacaacaacaacaacaacaacaacaaacagaaggataaactggcttgcctgtggaccctccccggctctggggccagtcgagagccactgagggacccagcactcagagacacaacacacatgtgtagctgcttctggctgagtgtgtttcctgtcaccaatggcctgtttggctggacgatgcctcggcttgaccttttttgaaaagtgctggttagttcccgcccctggtaaacctggggtaggtgggggttctgtcttaactcgaggggcacctgggatccaggacgcttctagggggctctggctgcccgtgttaatgaaggacagcgcttccgcgagcaccctgggaactgggtcttgggtagcaaagccctcccagagaaaagatgggcacaactaaggctttcctgagcaggaagggggtgaagaccaatcccttcctttggtcctttggtacgcaccccctcagagctgagatggaagacatggctagttcttttcagccttgtggagcctgtcagtcgccatcatacctcgagtgaggcccagctagataatgacttgtccaagatggcacacgtggaaagttgatctgcaccagaacccggatgactgtcaccttgaagcgtcctgttctccttctgtgctgtcccaggaagtgtctggcgggcgtgggcagcacagctctacactgtacgattcactagggcatcctgcgagcctcactagccttctggttcatgcctttgacaagcatttttgtgccccctctgcttactgtgacagtcgatgatgaatcttgcgttgccattttctgctgtgggtaactgcgtgcagtgtcttgccttgctttctcttcttactgtcccacagcttggtttcatgttacaaacagaaaagctcgaggctcccaccccgccacatcccaacttcatttccccctcactgtagcccatttccaccccaccacaaagttgccacaggttttctttgtatagaatatttattttgaagctctattttaatagtatttattttagaaagtctactattgtaagagttcttctgtttgtgaagaaaaaaacaagttaaaaactgaatgtactgatttagaaaatatatataaatatatattgttaaatatacacgggactgccgtt

SEQ ID NO: 374 - DNA, 2472 bp, Homo sapiens
  misc_feature: Incyte ID No: 333680.1
  unsure 1116, 1509: a, t, c, g, or other
agaagatatagtctgggccaagtttctaaagaagaaagaaaaaacattagatttaacaggtcaaaaagtttggctttccacactatgctcacaaaaggtgtgggttcagatgacggcgaagatgaaaacaggggagacataccagccagcatctctctttcagaaatagacccacttggccaaggaaatgacaagctgccgtttaagacagacactgagagatcacagctgggggagtcttcagtttcatacccaaatattatacatatagactcagagaatttgtcagaaactgttaaagaaaactcccaggaagaaactccagagacaactgcaagtcctatagaataccaagataagctctacttgcacttaaaaaaaaacctcagcaaagtgaaagcatatgccatggaaattggaaagaagattccagtccctgatcagtgtaccattgaagacactgtgagaagttgtgtagcaaagttgttcttcacctgctccctgaagggtcattactgcctatacagtaagtccagttttattctcatcagccaagaacctcagccatggatccagatcatgtttctatttcagcaggatctggaccaggtacagctccatctggaagaagtgaggttctttgacgtgtttggcttcagtgaaacagcaggagcatggcaatgcttcatgtgcaacaatcctgagaaagcaactgttgtaaatcaagatggccagcctctcatagaaggaaaacttaaagagaagcaagtcagatggaagttcatcaaaaggtggaaaacacgctattttacactggctggaaatcaacttctgtttcaaaaaggaaagtctaaagatgaccctgacgactgcccaatagaactcagcaaagtacagagtgtgaaggctgtggccaagaaacgcagggaccgctctctcccccgggctttcgaaatcttcacagacaataaaacctatgtctttaaggccaaggatgagaagaatgcagaagaatggctccagtgcatcaacgtggcagttgcccaagccaaagaaagggaaagtagagaagtaccacatatctgtagggatttataagtcagccatgacaattanacaccacaggcattgtattatcattgccaatgtcaagaaaaagagctaaatttaccaagccatgttgttttttactaaataccaatggaattgttgtcctttaagaagaagggcctaaaatggcaggattcttagtaaatgtcatactctaacagctttagtattgacttcagaatatatctgatgcccacaaaaataaaataaaaggagctagagagtatgccctcagatagtgtggggccaggaagggaaaagtcactgataaaagaacttctgtagatatgtctttaaaactgtgagaaaacaacatgaaaagatgcctgaactctccatcctgaggaaagattagcacttgctgatgaaaatcacagtctgtcaaaggtattaaaaganaactttaaaaaaaaaaacctttagaaacgttgaactaatgtacactgagaaaaaccatataacttacttatagacatataattacatgatcctctcttactacaactgaggctaacacatggtaaaatggttcccaaatcaagccagttatgtcattaaatacttgtctttcagaattacttatttaattattccatttaagttcatataatataatctacagtttagatacttggacatatatcctgcccaaggcactaagtgtaatataggaaaaggatagaaagccattttctctatcttcaaaataatgtgccatctccgttaaaattaagactttaaagttctataattttttctttgtattcaactttttaatacctccaaattacaaacatctatttttttcactacatagatatataattacactatgatagacagaattctagagtgattctcaataatccatgccttggtataatcctctcccccattgagtgtgggtgggacatgtaacctgcttctaaccaacagaatatggcaaaagtgatgggatcatctctcccatattatgttatgttatataacaaaagtgaagagaagttgcagatatacatagggtttctaatcagctgactttgagttaatcaaagagatcccctgggtgggcctgacctaatcagactagtcctttaaaagagagtgaaccagtcagagactctctctcctattagccttaaataagcaagctgccatgagctctacggctgcaaggaaataagttttgtgaacaaccatgtgatcttggaagaagcatctgaacctcagataaaagcccagccccagccaacgccttcgttgcagctttgtgaaactctgagcagaggacccagctaaatcacgtttggactcctgacccacagaaactttcagataataaatgtatgctgttttaaatct

SEQ ID NO: 375 - DNA, 2278 bp, Homo sapiens
  misc_feature: Incyte ID No: 411429.3
  unsure 1103, 1115: a, t, c, g, or other
gaaacagcctcgccccgcctacgcgggacccaaccgcggcgaccgggacgtgcactcctccagtagcggctgcacgtcgtgccaatggcccgctatgaggaggtgagcgtgtccggcttcgaggagttccaccgggccgtggaacagcacaatggcaagaccattttcgcctactttacgggttctaaggacgccggggggaaaagctggtgccccgactgcgtgcaggctgaaccagtcgtacgagaggggctgaagcacattagtgaaggatgtgtgttcatctactgccaagtaggagaaaagccttattggaaagatccaaataatgacttcagaaaaaacttgaaagtaacagcagtgcctacactacttaagtatggaacacctcaaaaactggtagaatctgagtgtcttcaggccaacctggtggaaatgttgttctctgaagattaagattttaggatggcaatcatgtcttgatgtcctgatttgttctagtatcaataaactgtatacttgctttgaattcatgttagcaataaatgatgttaaaaaaactggcatgtgtctaaacaatagagtgctattaaaatgcccatgaacctttagtttgcctgtaatacatggatatttttaagatataaagaagtcttcagaaatagcagtaaaggctcaaaggaacgtattcttgaaggtgacggaaatacctaaaaactcctaaaggtgcagagcacaccttccaaatctctcaaaagatcagtatcttttattttaagttatctccatctgcaaagcaactgatgatattcctgaaaccccttctttgattttggaatgtagaacctaacctcaccactgaaggaaagcacatgacctctaatctagcctctgcttaattcaggcagttttgttttgtttaataaaaaacagactcctgagcactagaagcagtttgttttgcagctgtctcaatgtgctttacttgggatgaggcaggtggcggagagcggccggaaagactctataacccagttgtgggaagaactccaagctgggagtcagtcacactgactctaccacttactaagctgtgtaaccanaggcaagttacncaccccgtccaaacctcagttttctcttctataaacaaggttcttagaataaaatgagaattcaaggaagcacttaacatagcacctggtttgtggtacctcccaaatcaatggtagctttcccaaatgaacacaagtatttgaggctcctcatgtttgttctaaagtcaagagtccagttagtaactaaccactagttgtcctgccatgactaggtcaagtgaggccacagtgattcagtgattcttaaagccaccttgcaaagcaggtaatacagttatttcctgtcctgcagaattcaagaacctttatgcagttcctgttctatgatttaaagaggtcagtgactccgctactctcactacatcttagagtagagtggtagagtagttgatctgagacagtaaggttccaggagatggtcttgccctactatatgtcaggaacagctagccttagaattcagtatacttggtggcccacccctaccccatgccccagtgccttatttggtctaaagcacctaacttttccattcttaatcagctgattatgctaaatgcgtaaaaaagaaaaacaccttacaaatccacagggaaatcaaagaacaattcaggtttaacagaaatagtctattaacaataaaaagttggatgaaaaagcacactaaaggttctaggggctaccataataaaggtagataggaagagttttcattttttttgtcttcactgtacaaaagaaatacattatatacatgtattaagtgcctcgtttgtatccagtttttcattttcccgatgtgttattttgctgttgctgctctgccaaggcttgctgaaggcgcatccgcttccgggaatagtgctgccaatgtagaatctgctgttcatcaataaatttcgcacactgagcattcaccagctcctttcggaagtgttcatattggagcagctctaacatgtgtaaacactgagggtacaattaaggtaatttgggttggctaaacattgcacaaattccaactccaactgaaaccgaagtcgatttccagcatcatctgtctccatagcgacagcagcggccataacaaacgaagacaccaaaacgccaccagcctgacagagcaaaagcccagagacgcgggcgaagttccggaaacc

SEQ ID NO: 376 - DNA, 1041 bp, Homo sapiens
  misc_feature: Incyte ID No: 2356055CB1
gacgtaggacctgatagcaaggagggggcacatttcagggacaccatgaagggtggcttcactgggggtgatgagtaccagaagcacttcctgcccagggactacttggctacttactacagcttcaatggcagcccctcacccgaggccgagatgctgaagtttaacttggaatgtctccacaagaccttcggccctggaggcctccaaggggacacgctgattgacattggctcaggtcctaccatctaccaagttcttgctgcctgtgattccttccaagacatcactctctccgactttaccgaccgcaaccgggaggagctggaaaagtggctgaagaaggagccgggggcctatgactggaccccagcggtgaaattcgcctgtgagctggaaggaaacagcggccgatgggaggagaaggaggagaagctgcgggcagcggtgaagcgggtgctcaagtgcgatgtccacctgggcaacccgctggccccggctgtgttgcctctcgccgactgtgtgctcaccctgctggccatggagtgtgcctgctgtagccttgatgcctaccgcgctgccctgtgcaaccttgcctcactgctcaagccgggtggccacctggtgaccactgtcacgcttcggctcccgtcctacgtggtggggaagcgtgaattttcctgcgtggccctggagaaagaggaggtggcagccaggcaatgtccaggagaggagattgccaaggaaaggaggctacaaatgccccctccttgtgatgtcaggacctcccttagcgagcgatctggccaagacacagggaaaagacacaggatccagacccggggctctgctccttggacggctcagtgcagagagtcagctggctgcctggaaggagagagtcggcaagggtgtgagggaatctttgggtgctgtggaagctgttctaccttatgaaatggggctgggatggactgagtgactatgctgtgctctgtcatttgtccgtaagtactcgctgcatactctgatgcgctgatg

SEQ ID NO: 377 - DNA, 3717 bp, Homo sapiens
  misc_feature: Incyte ID No: 239579.3
cgcgcggggactacaagccgcgccgcgctgccgctggcccctcagcaaccctcgacatggcgctgaggcggccaccgcgactccggctctgcgctcgggctgcctgacttcttcctggctgctgcttttcaggggctgcctgataggggctgtaaatctcaaatccagcaatcgaaccccagtggtacaggaatttgaaagtgtggaactgtcttgcatcattacggattcgcagacaagtgaccccaggatcgagtggaagaaaattcaagatgaacaaaccacatatgtgttttttgacaacaaaattcagggagacttggcgggtcgtgcagaaatactggggaagacatccctgaagatctggaatgtgacacggagagactcagccctttatcgctgtgaggtcgttgctcgaaatgaccgcaaggaaattgatgagattgtgatcgagttaactgtgcaagtgaagccagtgacccctgtctgtagagtgccgaaggctgtaccagtaggcaagatggcaacactgcactgccaggagagtgagggccacccccggcctcactacagctggtatcgcaatgatgtaccactgcccacggattccagagccaatcccagatttcgcaattcttctttccacttaaactctgaaacaggcactttggtgttcactgctgttcacaaggacgactctgggcagtactactgcattgcttccaatgacgcaggctcagccaggtgtgaggagcaggagatggaagtctatgacctgaacattggcggaattattgggggggttctggttgtccttgctgtactggccctgatcacgttgggcatctgctgtgcatacagacgtggctacttcatcaacaataaacaggatggagaaagttacaagaacccagggaaaccagatggagttaactacatccgcactgacgaggagggcgacttcagacacaagtcatcgtttgtgatctgagacccgcggtgtggctgagagcgcacagagcgcacgtgcacatacctctgctagaaactcctgtcaaggcagcgagagctgatgcactcggacagagctagacactcattcagaagcttttcgttttggccaaagttgaccactactcttcttactctaacaagccacatgaatagaagaattttcctcaagatggacccggtaaatataaccacaaggaagcgaaactgggtgcgttcactgagttgggttcctaatctgtttctggcctgattcccgcatgagtattagggtgatcttaaagagtttgctcacgtaaacgcccgtgctgggccctgtgaagccagcatgttcaccactggtcgttcagcagccacgacagcaccatgtgagatggcgaggtggctggacagcaccagcagcgcatcccggcgggaacccagaaaaggcttcttacacagcagccttacttcatcggcccacagacaccaccgcagtttcttcttaaaggctctgctgatcggtgttgcagtgtccattgtggagaagctttttggatcagcattttgtaaaaacaaccaaaatcaggaaggtaaattggttgctggaagagggatcttgcctgaggaaccctgcttgtccaacagggtgtcaggatttaaggaaaaccttcgtcttaggctaagtctgaaatggtactgaaatatgcttttctatgggtcttgtttattttataaaattttacatctaaatttttgctaaggatgtattttgattattgaaaagaaaatttctatttaaactgtaaatatattgtcatacaatgttaaataacctatttttttaaaaaagttcaacttaaggtagaagttccaagctactagtgttaaattggaaaatatcaataattaagagtattttacccaaggaatcctctcatggaagtttactgtgatgttccttttctcacacaagttttagcctttttcacaagggaactcatactgtctacacatcagaccatagttgcttaggaaacctttaaaaattccagttaagcaatgttgaaatcagtttgcatctcttcaaaagaaacctctcaggttagctttgaactgcctcttcctgagatgactaggacagtctgtacccagaggccacccagaagccctcagatgtacatacacagatgccagtcagctcctggggttgcgccaggcgcccccgctctagctcactgttgcctcgctgtctgccaggaggccctgccatccttgggccctggcagtggctgtgtcccagtgagctttactcacgtggcccttgcttcatccagcacagctctcaggtgggcactgcagggacactggtgtcttccatgtagcgtcccagctttgggctcctgtaacagacctctttttggttatggatggctcacaaaatagggcccccaatgctattttttttttttaagtttgtttaattatttgttaagattgtctaaggccaaaggcaattgcgaaatcaagtctgtcaagtacaataacatttttaaaagaaaatggatcccactgttcctctttgccacagagaaagcacccagacgccacaggctctgtcgcatttcaaaacaaaccatgatggagtggcggccagtccagccttttaaagaacgtcaggtggagcagccaggtgaaaggcctggcggggaggaaagtgaaacgcctgaatcaaaagcagttttctaattttgactttaaatttttcatccgccggagacactgctcccatttgtggggggacattagcaacatcactcagaagcctgtgttcttcaagagcaggtgttctcagcctcacatgccctgccgtgctggactcaggactgaagtgctgtaaagcaaggagctgctgagaaggagcactccactgtgtgcctggagaatggctctcactactcaccttgtctttcagcttccagtgtcttgggttttttatactttgacagcttttttttaattgcatacatgagactgtgttgactttttttagttatgtgaaacactttgccgcaggccgcctggcagaggcaggaaatgctccagcagtggctcagtgctccctggtgtctgctgcatggcatcctggatgcttagcatgcaagttccctccatcattgccaccttggtagagagggatggctccccaccctcagcgttggggattcacgctccagcctccttcttggttgtcatagtgatagggtagccttattgccccctcttcttataccctaaaaccttctacactagtgccatgggaaccaggtctgaaaaagtagagagaagtgaaagtagagtctgggaagtagctgcctataactgagactagacggaaaaggaatactcgtgtattttaagatatgaatgtgactcaagactcgaggccgatacgaggctgtgattctgcctttggatggatgttgctgtacacagatgctacagacttgtactaacacaccgtaatttggcatttgtttaacctcatttataaaagcttcaaaaaaacccaaacattgcttcattctttgttatttgctcttacgttgggtttgtctcttcttcctagcatttcagtggttaggcatgcacactaaaaatgctatcaatcacccatccaccagggaagtcagtgctgggcaggaggtcagcctgtgtgctcaagag

SEQ ID NO: 378 - DNA, 2689 bp, Homo sapiens
  misc_feature: Incyte ID No: 332240.1
cacacctgatggtgtgactcggccgacgcgagcgccgcgcttcgctttcagctgctagctggcccaagggaggcgaccgcggagggtggcgaggggcggccaggacccgcagccccggggccgggccggtccggaccgccagggagggcaggtcagtgggcagatcgcgtccgcgggattcaatctctgcccgctctgataacagtccttttccctggcgctcacttcgtgcctggcacccggctgggcgcctcaagaccgttgtctcttcgatcgcttctttggacttggcgaccatttcagagatgtcttccagaagtaccaaagatttaattaaaagtaagtggggatcgaagcctagtaactccaaatccgaaactacattagaaaaattaaagggagaaattgcacacttaaagacatcagtggatgaaatcacaagtgggaaaggaaagctgactgataaagagagacacagacttttggagaaaattcgagtccttgaggctgagaaggagaagaatgcttatcaactcacagagaaggacaaagaaatacagcgactgagagaccaactgaaggccagatatagtactaccgcattgcttgaacagctggaagagacaacgagagaaggagaaaggagggagcaggtgttgaaagccttatctgaagagaaagacgtattgaaacaacagttgtctgctgcaacctcacgaattgctgaacttgaaagcaaaaccaatacactccgtttatcacagactgtggctccaaactgcttcaactcatcaataaataatattcatgaaatggaaatacagctgaaagatgctctggagaaaaatcagcagtggctcgtgtatgatcagcagcgggaagtctatgtaaaaggacttttagcaaagatctttgagttggaaaagaaaacggaaacagctgctcattcactcccacagcagacaaaaaaggcctgaatcagaaggttatcttcaagaagagaagcagaaatgttacaaccgatctcttggcaagtgcaaaaaaagatcttgaggttgaaccgacaaaccataagctcagctgagcttttgaactgagtgaatttgcgaagaaaatagtgaagaaacccaaaaagaagttcacaagtattaaatcagctgtgtgtattcacaaagaaggacaagatgtgcaacatctgggaagatgataggcataaaacagagaagatacaaaaactccagggaagagaatgatattgctagggggaaacttgaagaagagaagaagagatccgaagagcgtcttatctcaggtccagtttctttacacatctctgctgaagcagcaacgaacgaacacaagcaagggtagatctgttggtacaacagaatgcagggcatgtactttagactttgagagaatgaaacaatctcgaccgtcaacatgtgcagcatcaatctgcatagtaattcttaaggagctccgaaaagcaagaaatcaaataacacagttggaatctttgaaacgagcattcatgagtttgccatcacagagccattagtcacgttccaaggagaggactgaaaacagagaaaaagttgccgcctcaccaaaaagtcccactgctgcactcaatgaaagcctgggtgggaatgtcccaagtgcaatatacagtatccagccactgagcatcgcgatctgcttgtccatgtggaatactgttcaaagtagcaaaataagtatttgttttgatattaaaagattcaatactgtattttctgttagcttgtgggcattttgaattatatatttcacattttgcataaaactgcctatctaccttggacactccagcatgctagtgaatcatgtatcttttaggctgctgtgcatttctcttggcagtgatacctccctgacatggttcatcatcagggctgcaatgacagaatgtggtgagcagcgtctactgagactactaacattttgcactgtcaaaatacttggtgaggaaaatatagctcaggttattgctaatgggttaatgcaccagcaagcaaaatattttatgttttgggggttttgaaaaatcaaagataattaaccaaggatcttaactgtgttcgcattttttatccaagcacttagaaaacctacaatcctaattttgatgtccattgttaagaggtggtgatagatactattttttttttcatattgtatagcggttattagaaaagttggggattttcttgatctttattgctgcttaccattgaaacttaacccagctgtgttccccaactctgttctgcgcacgaaacagtatctgtttgaggtataatccttaagtggcccacacacaatgttttcctccttatgttatcctggcagtaacctgtaacttgaattacattagcacattctgcttagctaaaattgttaaaaataaactttaataaacccatgtagccctctcatttgattgacagtattttagttatttttggcattcttaaagctgggcaatgtaatgatcagactccttgtttgtctgaacacgcatctttatacatgctttttggtaaaccaaaaacttttaaatgttcttcaggttttctaacatgcttaccactgggctactgtaaatgagacacagaataaaattatttcctgttctaaaaaaaaa

SEQ ID NO: 379 - DNA, 425 bp, Homo sapiens
  misc_feature: Incyte ID No: 255161.1
gctgtaaaaagctttatttccatttggtctaaggcttgggagagggctctagagttggtttaaaaaagctgcctagtggctggagggagaggcttaggcagagcggggctcttcagatgtcgctgggttcggtaggctcccgtgtgcctgagggtgaacctttttgcccagcccggcctggaggccggctggcctgtgaaggttggtcaggtggtcacctatcttcttgatgagttttactttttcatctaggaagtggctctccaggaagtcacagatatgggggtctgtgcaggtggaacccaaggcatgaagatccaaaagggtccagttcaggttcttctccagggccagagtgacttccatcgcacccagggttttaccccattcatctttacatggcttctggatgtccgggaagacag

SEQ ID NO: 380 - DNA, 1406 bp, Homo sapiens
  misc_feature: Incyte ID No: 2454384CB1
ctagagcctggggtctcggcaacttccggcggcgggagctgcagagcgcaaggcccgcccactgcgcgtgcgcttcggcccggctcctcctgcgcccccggcccctgcgactgggacttggtacggccgggcggttggcgtcctctgcggctcctgccaggggcgggcttttcaaatcttccctttgaaggagtggcgacggcccggacagttcgcgttggagatggaggggccgagcctgaggggtcctgcgctccgcctggcggggcttcccacccagcaggactgcaacattcaagaaaaaatagacttagaaattcgaatgcgagaaggaatatggaaactcctttctctgagcactcagaaagatcaagttttacatgcagttaagaatctcatggtgtgcaatgctcgactaatggcctatacatcggagctacagaaattagaagaacagattgcaaatcagactggaagatgtgatgtgaaatttgaaagtaaagaacgaacagcatgtaaaggaaagattgccatatcagatattcgaataccactaatgtggaaagactctgatcacttcagcaataaagaacgatcacgacgctatgccattttttgtttattcaaaatgggagctaatgtgtttgatactgatgtggtgaatgtggataaaacaatcacagatatatgttttgaaaatgtaaccatattgtaagtattttttaatcttcagagaataaaaataatttaaaattcttcttttttaaaagaaagttcttattattggttctttggattcattttatgtttaaatgtttaagtgatctttaaatgtttaatatgattttaaaaattattttgttcagaagaagtccatttctctatctgcagttttctgatgtgaaataaaaatggaaatcttgtaattactattagcagtaaatatttgacttattagatatgacccatttttaaattgttaataaatatagttcagttattaacaaagctatgcatacaacagaatatcctgtaatgttatttgatatagagagaatttaagcataaaacaggatttttatctcatgtaggatatttggttgcagaaatactaaaatagtatagcgactttatttacaagatagtcctgaagtacatgctatataggaagagcactttgaaattttggggtgttctttttcttatggtgcacttctttcatgtacttcaaagcaataaaaaaaaatgggtgatctcagggctgtttttattgtccctgctcttttacaggctcattttattgtggtcataatacagaacaagaaggaactccttgggtagccatagaaatcatttttaacttacatagtttttcctgccctccttcaaaggttctatgtgcctaa

SEQ ID NO: 381 - DNA, 789 bp, Homo sapiens
  misc_feature: Incyte ID No: 1383298.3
aggagatttctgagtagaaacacgttagcagaggaaacttcatttggggaacaggattgttttgatgccatgctccctcagctgaccacacagattacatcctggccagaaaaaggccctgcaaagagctctgatcattttggttctgattccatccttagttcttacccattatctgcttacccttcctccccacctatttaagatacaaagcaaaacaaaccaaaaatacagatgagttgcttggtagagctgcctaggcctccaaggcggggcccagaggattttttgactgaaccccctgttgtgttttccatatgtgcttccccagaccgcccaggtttgctgaatgtgaagcccattgaagacattcaagacaacctgctacaagccctggagctccagctgaagctgaaccaccctgagtcctcacagctgtttgccaagctgctccagaaaatgacagacctcagacagattgtcacggaacacgtgcagctactgcaggtgatcaagaagacggagacagacatgagtcttcacccgctcctgcaggagatctacaaggacttgtactagcagagagtcctgagccactgccaacatttcccttcttccagttgcactattctgagggaaaatctgacacctaagaaatttactgtgaaaaagcattttaaaaagaaaaggttttagaatatgatctattttatgcatattgtttataaagacacatttacaatttacttttaatattaaaaattaccatattatgaaattgctgatagt

SEQ ID NO: 382 - DNA, 551 bp, Homo sapiens
  misc_feature: Incyte ID No: 383376.7
  unsure 317: a, t, c, g, or other
gtggcaccagcctgggaaatgggttgagcttcccggctgcaccttcccactgatggcccacagtgctgcttcttggccggagtatctgagctcagctcaaaccaatgctgaggaagggagggtgagtcccctggcttctccaaggtgcttgcctgggtgcctcagtcaggtgattttgacccaaactgtttgagtggtgctcactgagacgagccccactcatcccctccgtgggccctaccctgtggtgggacttacatgttaagccaggcttcacgtctagaaaccaccttcctgagagaagagcacattcccangggaccctgggctccagccctgccccagcttgttggactaactctggtgccctgcaggtcggctcccagtgggcctccccggagaacccctgcctcatcaatgagtgtgtccgagtgaaggaggaggtctttatacaacaaaggaacgtctcctgcccccagctggaggtccctgtctgcccctcgggctttcagctgagctgtaagacctcagcgtgctgcccaagctgtcgc

SEQ ID NO: 383 - DNA, 1121 bp, Homo sapiens
  misc_feature: Incyte ID No: 230816.1
gcggccgcgcgcgctccccgacgcccgggcccgcggccacgacgtgcgcttcgcggagttcctggcctacctgctggacccgcgcacgcggcgtgaggagcccttcaacgagcacttagagcgcgcgcacgcgctctgccacccgtgtcgcctccgctacgacgtcgtgggcaagttcgagacgctggcggaggacgcggccttcgtgctgggcctggcgggcgcatccgacctgagcttccctgggccgccgcggccccggggagccgccgcctcccgcgacctggcagcgcgcctcttccgggacatcagccccttctaccagcggcgcctcttcgacctctacaagatggacttcctgcttttcaactactccgccccctcctacctgcggctgctctagcggtcctggaggtcctgtggccacgcggggcaagtgcctttccgacaagacccccggggaatgcaggtgctgccggccccaggacccctcttcaagagccactgcgtgcactcacctggccgccgggccagcgggcgcagggcacacctggccaggcttgggggcagcccatctcaggtggccctgcacgcgtgtgcctgcctcggcctgtcgcctgaggcctgcttcctccacttgctccagctgacaggcacctctccaggccccgtagatgggcaaggacttgataaccagggttttaggcttttaaaggccattttgggggtcagccctgcccctgaacctgttcatggtgcatcagaacataatgctgacaccggtgtcagtgtggcccgagcctgtgtcctccccacctcgcccaccctggcaaggacagctgcggccaaggacgaaagccctcccttggctggcctcacgatggggccgtcccgggagccaggtgggagctgccttccactgccatcgggtctcctctcctctcccacgcggctggccctacccaggcgccaccttcggtctcagtctggcaagacgctgggtcttcaggctccatgccaacagagcccctggtgcaatgcggtcacaggttttatgggactttggtgagctgggcggtcatggttttgaaataaatgtattttgttactttctgaaaaaa

SEQ ID NO: 384 - DNA, 2118 bp, Homo sapiens
  misc_feature: Incyte ID No: 211949.2
ctggaagctggggagctcgtcttcactctcggtcgggcccagccagtcaccaagaccagccagagtggcaggaggacatgggacggacaggaggtggtggttgtggacactccttccttcaaccagatgctggatgtcgaaaaggacccatcccggttagaagaggaggtcaagcgctgtttgtcctgctgtgaaaaaggggacacattttttgtcctggtgttccagctgggacgattcactgaagaggacaaaacagctgtggcgaaactggaggccatctttggagcagactttacgaaatacgcgattatgctgttcacccggaaggaagacctaggggcggggaatttggaagacttcatgaagaactcagataacaaagcccttcggcgcatttttaaaaagtgtgggcggcgagtttgtgcttttaacaacaaagaaacaggccaggcccaggaaacccaggtgaaagctcttttaacaaaggtcaatgatctgagaaaagaaagtgggtggtccgggtatccccatacacaggagaacgtcagcaaactaattaaaaatgtccaggaaatgtcccaagccgaaaaactccttaaaaatttaataggtattttacaataggtagccgaagtgcctggggtctcttcaattagagacaccctcaggttggggggaggggcggggcatggtacaacctgtgggaagggaagcgggttcatggctttgagggcctgagaggcaaatgcatcccgccttgtgatgtatcagctatttgtagataaataaattgcaggtgggggcgaatagtagggtattataaaggagaaagaagatacaaggtggggaaatctggaaaaagatttcagacattaggctgataataagtggtagaatcaagtcacaagaatcacctcacttgtgtaggtaggttggaatcaggatagacactgtgatcaaggctgaggccacctgggatgagaatatagatagtcgtacaacaacccaggggatccagatacatgagaccagggcagcgttcagcacactcctgggcatggcggaagcaggaagcagactccagagggcctccctgttgtccagggccgttggctccctgagctctcctgtctcctttgggatgcgacttagggctagagtgttcttttcttcacacgttagccattccttacggctcttcacgttccacgcctagatgtgaagtgggacatagtcttccattgctggctgtccctgaggaaacagacatgagtcttggaggttctgaatgattttattgctaattatcacagtgacatagactagaacagaaattagaagcatagtaagattgccaaaatcagagaatcttgcaaagttctgtaattctaagtgttgttctagatttcctctagagaaggttattagaatctccattgcgtttctctttctccttctctttcccttgaggttaggaaacaggttaaaactcagagaactccaataataatggtttaaaaacatcaggggcttcctgtatctcctgtcaggaagccgaggaataagcaggctggggctggtgggcgtcaacatcccagttttgttctatctttctgtcccacctgcactgggatgtggcttctacactcgaatttgcttcttggtttcaagacagtggtgttctttccatagctgagcagattattttgagaggtgggtgatatgtgagagagaaatctggaaccttcttctgggtagatacaggataagatagatacagggtaaaatgttgagcactttgtacatgctttgagagcataatctttgtcatctgtttttttcccctagacaatatcaggttaccgtcaacattaatccatttaaaaggacatggactgttgccattaatacttttggattccatataacccttaacacaataacttctagaaaatgtgtgtgccgtagacacaaagaagggaacaatagacaccagggtatacttgagggtggagggtggcaggagggtgaagattgaaaagctgcctattgcgtgttatgctggtttcctgggtgacaaaattacctgtacaccacacccctgtgacacacaac

SEQ ID NO: 385 - DNA, 370 bp, Homo sapiens
  misc_feature: Incyte ID No: 238853.42
ccttcctcccttggaccataaatttttattggcaggtcaggagaagagccgggggtaagggtcccttccttcccatccctctacccagaagacaccctccaaaggacagcagaagccccagagcctgctgcctcagaggaccttggaggcagacaaattgttgtagtgatcttcctgtccctcgagcaggctgcggtaggtggcaatctcctgctccagccgcgacttgatgtccatgagccgctggtactcctgattctgccgctcactatcagctcgcacatcgcccagctgggcttcaataccgctgatcagcgcctggatataatggtggcaccaagaatcttgtcccgcaggtcctggatggtcg

SEQ ID NO: 386 - DNA, 3573 bp, Homo sapiens
  misc_feature: Incyte ID No: 333165.2
gagaaatcctgctgcacactggctttgtcccggagtcggattccctcctgcctgcacgccttcagtaactccgagcagaaatcacatcttgcccacatgctgtaacctaagaaactgctatgcaaggctgggtgctgtggctcatgcctgtaatcccagcactttgggaggccaaggcaggtggatcacctgaggtcaggagttcgagacaagcgtggccaatatggcaaagcccagtctctactaataatacaaaaattagctgggcatggtggcgcatgcctgtaatcccagctactgggaaggctgaggtaggagaatcttttgaatctgggaagcggaggttgcagtgagctgagatcgcaccactgcactccagcctgggagatacagcgagactgtctccaaaaacaaaaacaaaaacaaaaaaacattcaaacaactgtttgcaatataaaaagctcatttactgtaatatttatgatacagtgaatatgaaaatgcactggtcagaaggcactctcaaagagccgcactgctcctgacatcgtccttagcaatgaaatcacaaagacagccaaagcagtcctgcttcttggaaatcagaagctgcctttatcacatataaagccaaacagggcataaccatgtcacgtgagcatgtcatcaggcttctgaggacttgttctttataaaaaaagaccttcacaaaatatcttggcttagagatagcagtctttattaacaaaggccacctaggctgacacctgcagataatcatctccttttctttgtctatgttgtacattttcatgatataacttttaactatgtctagagaaggcaggctctgcaagagaggtgccctttcaacccgctcagtgccctggacaggagatgctgtgttaaactgttaatggatatctatatgagaagctcatttttgtatgctatccctgcagttttttttttttctaacaggcccatgtttgagaataaacaagtctgtgatgtcagagacaaaggtgtattcttcagtctgcaggtgtgtggcacctcccttctcccctgcagccccccacatccagagccgttcctgagagtgacatcatgcatcaagaaaacataaccttggtcctcaggtgaacccttggaacattctgtgaccgcctgatgtccattctgagccaccttggcacacatgcttacaggcagcactgctaagggttcaggtgccccatggctgacagcccgagttgcttctgtggaccatcatgccgctcggcacgtcctgagacagaagttgctgcaggaaggagcttctggagaggtcctgtggcatgtgtgggggtgtgtgtgtgtatgtttccttcttgaacagacattccaactttagatgtgtttatagaactgacctttttactaacaaaatacaatgatatatgttggaaactacttaatatgcttttcctgcacaccttagcaataactgtaggggtctctgctagagttgtttgtatgtacagcaattttgaacaaattgttttaaatgtaatataagagaattagtttaaggaagtaaagagaatcatttgcttgtgttacattttcagtgaggattcagtttaagagtcattcttaggacttccatttcctaatatttattcatgggtaatgaagaaatggtttgcattttgtggccagtcctaatttattttccagctgagccctaacttccggctcccacctacctccacggacttcctaacagagacttatgaataccaggatgtgtttttgttaagtcaggttcaattcgttgcccctgtcagttttatagagtgtgagggtcactccattaaagatctctcctgggtggatcctacttggatgttcaggtgattttgaaaactgctaacatttttaaaaggctagaacatcctttgacttcttgaaaatctgcatgtctggcttgggttttattaccacatgcctgagttcttcaagaatggaaggctcaagtattctcatcttccatttgccaaacttccttcctgatttgagtcacgtgttccacttggaaagaaagggaacagagagcctcctccatggacagtgtatgaatttcattgggaatcttgctctctcccgcctctatgcctttctctctttttaaccttactttacataatattatagatgggccaagaaaagaaaagatgacataacattttgatgaatttcacctattccattcttcacgtttcagaattggtcgactttgttagaagataattgaagtagccttgggtcaaaagcaaccttttcaattgtgatcatacctaaaacatataaaaaccctgccgtagattaaaagcaattataaaatcataaaattgaatgtttgcagaatcctggagcagtagatttctttgtctttggcctgcggactagaaagagggcagcagtagtatgctggagcttccctgggataccagccacatggtttcttttcattagatctgatttttgtttcccactgtagatctgattttgtagttgaaaacatttcaccaccatcaaacactatttctgaatattgtgcctttttatacctagcctagatgaaaaccgatgccattcttattcagaaaatccccccatcctacatgactgttatctagacataaagcaaagtgcatttaattcaaaatttggttcacaatataagtattttgtaaaagccagctgaaccagcattttatcaggtggaaatctctgcaagccaaattgctgatactccttcatgcagatcaacttggtgtcccagtcagaatagaacagcataattacctggagttagggggagtatttctgcactattacttgtcagggagagaagaaacttagaattgtccctcaaaggagtgtcaagaagtatgaataaatgtcctttcaccagctcacaggccagaaatggaggacccaagtcaactaggtgaaactactagcagacccagctttcccataataacctaatctgcaaattgttctattaaagtctcattgttttcaggatgcaatgaaagtggatttcaaaaggctttggaaaaataagtggaacatgactgatcttgaaaaaaaaagcaaaagcttaaatatttgatacaagtttacttagctacaacatactttacattgttgcctttagttatctcacaggcactgacattttatatttagaaaatacttttaatctttctaatctttttttgtaaatattagtgtccattctgtatgactcgctaacctactttgcaaggctttgggcaacattttagctcattaacttcaagatgatgtgtcatctgtataggtcaaagaatgggacttctgaactgaggaatttgctgttgacagccaaagtatagtgtacaagattgatgtaacttgatatgtatttttgttgaagttttttgtaaaaaaaaattatttacaatgttatttgaatgatttttttaaatgctgtgaatctatatttgttgttttgtatattaaaattcatttgccaaa

SEQ ID NO: 387 - DNA, 1303 bp, Homo sapiens
  misc_feature: Incyte ID No: 344868.12
tctcaacaacaacaaagaaaaagtgtttttgtttactgcttagcttacacacaaatcaattgagcaaagaaccctaggggctgtttacagaaattccaggagaagtttcatgcatggggtaagggccaaatcaacagaaacacagcgcctggtttcctcagcaccaagttgcccttcagtttcagttgcccttggtagctgtatgaacttgaatctcccccgatgaatgtttgttaactttaattatgtttgtttttcccaagaagtactactttttctgtctcttatcagtgttaaacatctcctctcagtttgaaaatcagtagatcaacctggttaaagataactttttgccagataaatgagttacacaactctccttaccatccttctgtttctctacatcctcacaatcatttgtactgaatgcaacagaggaaggagtgttattgctttgtgatgactccgtggttgattattaacttcacaggtgatgttgggaggtagcaaaaatggagaaaagaagaaaatcaattatatagatataagagttgtaatgtggttctttcaataagaaaccacagaagagaactgttgtactgagggtatgaaagagagcgaggaagggcaactgggatgttcttagatccaaccgatcctgtgtttacctgccttctcttcccagtcccagcaagtgtatgagcagcttgagggttcttaagagacagctctcgtccatctttatttccccagaacagcagagcattgcacataagaataacaataatagattgagctctgtgtccagtactattctaaggaatataaatatatattcatatatatttatgaatatatgtatatttatctaatcccacagcaacctagtgaagtaggtgctgttattactcccattttacagataagaaactgagccgcagtagctatgaagtcatagaactagagtggaatgtaggcagttggaccctgaaccctccatcaaggagtaggtatccctgaaataagtgaggggaaaatgcagcctttccagacccattggctctgatatctggagcggggatcctgccttctgaaaggcagaattattggtgattccatgtgctcttgtttactttgcttaccaagacctatcaagattgagtcatttatgctctcatctctgagagactcagtgctcttcatgcagttggacccaacgcttcatgcaccactacttacagggtatggctctctcggcatgatgaccagcgtgctggtttgtccagatggcaagacagtagaa

SEQ ID NO: 388 - DNA, 814 bp, Homo sapiens
  misc_feature: Incyte ID No: 148304.14
  unsure 263, 267, 588: a, t, c, g, or other
ctgatatgcagcatacacagcagcatcagagctcagagggtcacagactggtcaagggagggcgctagtgtgccagcagagaaatgacttcctccaggtcaagccacattcggattgtggggagatgggggttctaagagaggcttttgataatttcctccttggcccaggctgggctacagcaaggagtgttcttgtgtgatctctttcagctcgagccgtcatgctgtttgctctcatccccgtcacaaccatccgatcanctangtccaaactcataaagggctcctcttatggaaaggtgttcgtcatactgcagctgtccttggctctgaccggcgtggtgacatccaccttgtacaacaagatctaccagctcaccatggacatgtttgtgggctcctgctttgctctctcctcctttctctccttcctggccatcattccaattagcatcgtggcctataaacaagtcccattgtcaccatatggagacatcatagagaaatgaagatgcttacctgcaggaactgaaaacatcagccatggccaggcccccagaagacaaaagaagggaccagggaatgntgacctaagcaacccactgcttaagaaacctgcgttccagccagagttggcctcagaatgacctgctctggctcagggatccctggtggatggggaaaagcactttctggtgatggaaaaaacgttctcagctttaagacacccccattaggcagacactgggttctgtgacagcagagcatgaccttaagggttacagggaggctgcacacagcagtcccaggcc

SEQ ID NO: 389 - DNA, 835 bp, Homo sapiens
  misc_feature: Incyte ID No: 247747.6
acttctttcattcctttaagaaaaagtgtgacaagcacccaggtctgagtgaccatgggatttcttgcagttgttaattcaagtaaaacagtattccaggaaaatgttctctagttttagcttgcaactcagatagttgcacaaatccttttaatcgtattttggtgtacagtggaagtgctttatggcatacttctcattttatcacacagaacattaaaaagacatctcaaggatggagagctaataaaattaatactttctactgcatatggtgaagtgacagtaagtgaaactggcatttttaaactacaagcgaagaaggatgcagaacagagagactgctaatatggtttactgtcactgccttgatttgtgttgaggcaccagcagctttctccaccgctgccttggtaccatcattacaaatgtcaacccagtggaaaaaggtgtgaatattgtcttgaaaatagttttgacctcatggaccccctcaaagggtctcagaccacaagggatctacagcccacactaagaactgctgccctgacaaaaacgctttctctctgtaacagactttgagagttttgacctgcctgaagagcaccagattgcgcacctccccttgagtggagtgcctctcatgatccttgacgaggagagagagcttgaaaagctgtttcagctgggccccccttcacctgtgaagatgccctctccaccatgggaatccaatctgttgcagtctccttcaagcattctgtcgaccctggatgttgaattgccacctgtttgctgtgacatagatatttaaatttcttagtgcttcagagtt

SEQ ID NO: 390 - DNA, 2044 bp, Homo sapiens
  misc_feature: Incyte ID No: 001153.12
ccggatcctctagagatccctcgacctcgacccacgcgtccgtgaaatactcaaacgtgatacctaaaatttaagtatctgaagcgaacgttaaaacacaggaagtaggctttcctgcacgacttgaagagaggcattctcattaattgaatcaatcaccagagaccatttgagaactgaacgacctaaaacccttgcattcctagtcttccttttcagaacatgaaaacttaaagtgtaggggaagggcaataaacttagcttcttctttgggacttaaaggcattattcgtttaggttttagacagactgatcatttgaggatcaacaagtgttttgtgatatgacagactttaagtagcacagtagttttgtgtggacccagccacctagcatttgggacagcactgatggctcttgtctttgttccaggtcaccgtagagtttgcagatgaagtacgattgtccttcatttgtactgaagtagattgcaaagtggttcatgaattcattggtggctacatatttctctcaacacgtgcaaaagaccaaaacgagagtttagatgaagagatgttctacaaacttaccagtggttgggtgtgaatagaaatactgtttaatgaaactccacggccataacaatatttaactttaaaagctgtttgttatatgctgcttaataaagtaagcttgaaatttatcattttatcatgaaaacttctttgccttaccagaccagttaatatgtgcactaaacaagcacgactattaatctatcatgttatgatataataaacttgaatttggcacacattccttagggccatgaattgaaaactgaaatagtgggcaaatcaggaacaaaccatcactgatttactgatttaagctagccaaactgtaagaaacaagccatctattttaaagctatccagggcttaacctatatgaactctatttatcatgtctaatgcatgtgatttaatgtatgtttaatttgatatcatgttttaaaatatcctacttctggtagccatttaattcctccccctacccccaaataaatcaggcatgcaggaggcctgatatttagtaatgtcattgtgtttgaccttgaaggaaaatgctattagtccgtcgtgcttgatttgtttttgtccttgaataagcatgttatgtatattgtctcgtgtttttatttttacaccatattgtattacacttttagtattcaccagcataatcactgtctgcctaaaatatgcaactctttgcattacaatatgaagtaaagttctatgaagtatgcattttgtgtaactaatgtaaaaacacaaattttataaaattgtacagttttttaaaaactactcacaactagcagatggcttaaatgtagcaatctctgcgttaattaaatgcctttaagagatataattaacgtgcagttttaatatctactaaattaagaatgacttcattatgatcatgatttgccacaatgtccttaactctaatgcctggactggccatgttctagtctgttgcgctgttacaatctgtattggtgctagtcagaaaattcctagctcacatagcccaaaagggtgcgagggagaggtggattaccagtattgttcaataatccatggttcaaagactgtataaatgcattttattttaaataaaagcaaaacttttatttaatatttatttttgtacttgtttttaatgtttacatagtattaatttagtagaaatgaacttctgccttttggaattgctttgcctgcatgttattttgtgagaacaactggttagtattccacagcgttgccagatagagatactttatctcaaagatagtctttcacctcaattgaaaagccctcattttcttaatacttaaaaatgaatgtgtaatatctaaatgttagaaatgtacttataaatagaagttggctgtggcagaatttgttttaaataacaaaattattcttggtttacaaaaaaaaatacatttacgaatttactcccagtc

SEQ ID NO: 391 - DNA, 752 bp, Homo sapiens
  misc_feature: Incyte ID No: 1095728.19
acgagatcctccaggctgtgcatagaatctgatttacatatggattcccaacacccagttcactagaaattcacattatccatattacacaatccaaactttgaaatggatcaaaccagaattccttcttcagtcccagttgcctgattctaactttcttcatccggtattattttctgtctgttaacaggacttggtggcacaaaatacatctcctttgaggaacggcagtggcataacgactgctttaactgtaagaagtgctccctctcactggtggggcgtggcttcctcacagagagggacgacatcctgtgccccgactgtgggaaagacatctgaattcaacacagagaagttgctgcttgtgatctcacacacagatttttatgttttctttctcacccaggcaatcttgccttctggtttcttccagccacattgagactttcttctagtgcttttcagtgatactcacgtttgcttaaaccctttagtgctttgtgatagttcagtcccagggaaagagaaaactcgccctaggccctaggtgggaagatggtttgaaatttttgtaatcgagtaaggcacacccaaatgtaaaaatccttttgaatgatgcctttataaatctttctctcactgtctatttaagtgcaattaacatatgtcacgaacttgaaagttttctaaactcaataaggtaatgaccagttgttatttacagctctgtaacctcccgttgcgtcaag

SEQ ID NO: 392 - DNA, 845 bp, Homo sapiens
  misc_feature: Incyte ID No: 222604.7
gttgaactcaagccttgcactcagctttcctaaggattcccctcgtactatattttttgtcaggcgactccgcggtcacctttgctccgcggtgattggcctgcagcggggtcctcgtgtttgtccaatatggcggcgcccagtggcggtgtgaactgtgaggagttcgccgagttccaggaattactcaaggtgatgaggacaattgatgacagaatagtacatgaattaaacactacggttccaacagcttcctttgcagggaaaattgatgccagccaaacctgtaaacaactttatgagtctttgatggcagctcatgccagtagagacagagtcataaaaaactgtatagcccagacttcagcagtagtaaaaaacctccgagaagagagagaaaagaatttggacgatttaacgttattaaaacaacttagaaaagagcagacaaagttgaaatggatgcagtcagaactgaatgttgaagaagtggtaaatgacaggagctggaaggtgtttaatgaacgctgccgaattcacttcaagcctccaaagaatgaataaagagagattcttttttttttttttttttaaggactgggtcatctcataagagctaagcatgacagatatcaacagggcgggctttctaggatgatttctgagccaacagtccaagaccttttgttgatttcagccccacttagccaagacctcaagtataaataattctgataattatggagaaatcaactgctattttatactgattctgttaaaaaaaaagttttgtaactattaaaataatgttctgactcagtgtaaaaaaagaaaaaccaaacctg

SEQ ID NO: 393 - DNA, 725 bp, Homo sapiens
  misc_feature: Incyte ID No: 1094984.14
aaggacaaggtgtggctgttgcgggagcagaagcgcaagaagaaactccgcaagctgctcaagcgcctgcagaacaacgacacgtgcagcatgccaggcctcacgtgcttcacccacgacaaccagcactggcagacggcgcctttctggacacctgatgaatgcagtgaacacactggacagggatgtcctcaaccagctacacgtacagctcatggagctgaggagctgcaagggttacaagcagtgtaacccccggactcgaaacatggacctgggacttaaagatggaggaagctatgagcaatacaggggacaactgtgggaaggctgggaaggttaagaaacaacagaggtggacctccaaaaacatagaggcatcacctgactgcacaggcaatgaaaaaccatgtgggtgatttccagcagacctgtgctattggccaggaggcctgagaaagcaagcacgcactctcagtcaacatgacagattctggaggataaccagcaggagcagagataacttcaggaagtccatttttgcccctgcttttgctttggattatacctcaccagctgcacaaaatgcattttttcgtatcaaaaagtcaccactaaccctcccccagaagctcacaaaggaaaacggagagagcgagcgagagagatttccttggaaatttctcccaagggcgaaagtcatttggaatttttaaattcatagg

SEQ ID NO: 394 - DNA, 814 bp, Homo sapiens
  misc_feature: Incyte ID No: 400702.1
  unsure 524, 783: a, t, c, g, or other
cccagggctggggacccctgctttaactgatgcattgatttgataaagtattttacaagcctgataatgttataaccctatttattcaggtcagatttatgccaactttgctgagaatatggagggtatagatgagtgaacatcaacaaacataacttctaccatggttaagaattttacttaggaaaagtattgaagttcaaatccagatagtattacatttgaaattgttataagggttattaatttaataaaattcatcatcaggtttcccctataagctttctcctaggttaattttccacaagcattgttttatatacactgtaatcaggataacacaagcttagtgttagatcttgtaggaaaccaagattagaaacattagaaatttgcagaatttaagaaattatgttttgtggtaatctatggccaacgatgttagaacctagcgcaattgtaaagtgaaattcaaggagaaggaatgaggagttagggaagcagcatacttgaatattagaganggagaggagctgtgggtcaggaatcagagagacctgctaaaaccagacagatataaacaccaaagacggaagccaaataggtagccaaaaatccagatatttgagaagcaggaaatttatagcaaccaaagaaatagggcaagagaggcaggtgaacacacatgatacctcattgacaatcttcctcccaccaagccagacacgttgtaaatgctgcttcctattggagcccagaaaaaaaggaaaagggaaagtttanggcttctttgtcctttgtgtggaagccaggg

SEQ ID NO: 395 - DNA, 1050 bp, Homo sapiens
  misc_feature: Incyte ID No: 196557.1
aaaggattcataacccccaaggctctcttgctcccctcgacagctggggacagctgggtcctattcccagcaggggtactgagccagcctgcgcttgggccactgcctgtagaggccacactcagcgccccgctcttagcagctgagttgagccatgactcatcccacccacccaccttgaggggcctcggtggtcctcccttcggtctcaccaggctgcattttggccctctgggggctggcccaagccgtcccctcccttcctgtcccctcccttcctgtcccctgggggaaggggccgccccagctggctgctggctgccagcctctcctcccctgcacctagtgctaagacttttccttgaaagggcagaagtcagcccctctcccgaatcccagaatctgacattccaggactccactaggcctgttttcctctgtgggaactagagccaaggcgagagacccgtgccagccccgaggctcccggggcccatgggcccagggcatcgggctggtacagggccccggggctctctcagcccatctgtcacccctcccccccaacacccagatgtcccgtcttgggcagtgctgtcccggactgccacattaatgctccagaacccgccagctgggccctggggccggtggggctcctgcagagccctggacaaaggcgagggagggagggaaggggatcctaagcacccctccctccctggccctaggaggcagacatgcccgatgagatcaacattgatgaattgttggagttagagagtgaagaggagagaagccggaaaatccagggactcctgaagtcatgtgggaaacctgtcgaggacttcatccaggagctgctggcaaagcttcaaggcctccacaggcagcccggcctccgccagccaagcccctcccacgacggcagcctcagccccctccaggaccgggcccggactgctcacccctgaccctcttgcactctccctgccccccggacgccgcccagcttgcttgtgtataagttgtatttaatggttctgtaac

SEQ ID NO: 396 - DNA, 2230 bp, Homo sapiens
  misc_feature: Incyte ID No: 237208.5
  unsure 452, 537, 542, 548: a, t, c, g, or other
cggccgcgcgttgggcagctcgggaccgccctcggacggcaccgcgggcttcgtgggtccccccgccccgcgcgtcctgcagaacttccaccccgacgaggcggagagcgatgaggacaacgacgtcgtcatcgagggcacactggagcctgcacgtcccccccagaccccgggcgcgcccgcaggcagcctctcccgggtcaatggcgcgggcctggcgcagcggctgcagcgggacctggccctggacggcggcctccagcggctgctcagctccctgcgggccgacccccgtcacagcctggcgctgccgccaggcggcgtggaggagcacgggcccgcggtcacgctctagactcccgagaggcccccaaatcctagctccagttccccggtaaggacagggacaggacctgcagactgcatccgctcattttttgttgtttttgtgnacacaaaaacaacgctgctctttgtttcaacttccgggtataaaaacacaagtattgcctatttttatagaatttcgccacagancttanaatgancgcctgtagagacactctataccaggcctgagtgcaggtcttggcgcctttgcaaagtgatagaaaagatctgaccaagtgcaaaaaaatgctttttaaaatttttacaaatactttgtttttaaagtgaagctttaaaattacttttttaaaatagtcaaattcatgtttttaagtaagttggcccatgcaacatgtctcagcattcttgctgtgctctctgctgacttgcaggcgaggccgactgtgctgatgtacgtgacaagaggctggtttttaataacgaatgcagccaggtgcagtcgctcacgtctgtaatcccagcactttgggaggcctacgtgggctgatcacgaggtcaggctggtcttgaactcctgacctcaggtgatacggtcccccctcagcctccaggggtgctgggattatagacgtgagccacagcaccagaccaggggctatttttgtgacccacataggtggcccattcagcctcaaggggaaatccagggtaggaagcagcagctctgctggactgggctcagcagtcccatttgggatgtaagcctctattgcctctaagatgacccttttcctgtgggttgactgactctgagggcgatttcggaaatgttttcagcagaaatgaaggataagcatcgcacatgtccagcaatgtctttgagaatgcagtcatttgcacgtgagttctcatctttgttttctgaaacagacgtttcttttagtaagtcacaatacatgctaattttcatttctagaatggtcactggcagttctcacttttaactataagaagtcacgtggaacttagtgatttttaacaaatactaaattcatcctcactttatgttgatcttccagcaacgtttatatatttagtaattttaaaaattcctatttgatacaattaaattttatataatgtgttttgcttgaataaaatgttacatttatactttgagaactctgaccgaatctttcatacagatacaggtaaagaaatatttctctaggttgtcggagctgcgtacctcccgctgcttctccttgtggtccagcaccacctgctggtcagtggcagaactgtcctgacttcgtgaacatggaactgctaagagggaaaactgcatctcagcattttcattttttctgaatattaagtgaaaagcaagttctatttgtaagaaatagcttttgctgaggagttgtgaattcctgcacctgtgtttgatgttatttgtatgcaatggattgctggccctttgttcctaagcaagagaagaccaaagatgcttccccatgacctctccggtgaggatccgcaccccccggacttgctctctgatgaagggcatgtcgttcagtgccccagcagtcagaagcagtttttgtggaactaaaactaataatgttaccctcacaaaggaaatgttcttttactaagttattgctgattcttgaatgtctgttatataactgggtcggctatcaagaaggaaggttatatttcttatcacattttaagttgttaagcaaatgtgagtttttttttaagaaatgaggctttcactgagatttgtgtgctattcataattttaggaattactgcttagaacagctgcttgggtgtatttttctacacaggtctgtacttctgccac

SEQ ID NO: 397 - DNA, 1919 bp, Homo sapiens
  misc_feature: Incyte ID No: 337792.2
cgcggggatctcagagtttcccgggcactcaccgtgtgtagttggcatctccgcgcgtccggacacccgatcccagcatccctgcctgcaggactgttcgtgttcagctcgcgtcctgcagctgtccgaggtgctccagttggaggctgaggttcccgggctctgtagctgagtgggcggcggcaccggcggagatgcctgggaagaaggcgcgcaagaacgctcaaccgagccccgcgcgggctccagcagagctggaagtcgagtgtgctactcaactcaggagatttggagacaaactgaacttccggcagaaacttctgaatctgatatccaaactcttctgctcaggaacctgactgcatcaaaaacttgcatgaggggactccttcaaaagagttttctcaggaggtgcacgtttcatcaatttgaagaaagactgcattgtaattgagaggaatgtgaaggtgcattcatgggtgcccttggaaacggaagatggaatacatcaaagtgaatttctgttcaagttttcccagattatcattctttgggatgagagaacattataaaaccactttgtttattttaaagcaagaatggaagacccttgaaaataaagaagtaattattgacacatttcttttttacttagagaatcgttctagtgtttttgccgaagattaccgctggcctactgtgaagggagatgacctgtgattagactgggcggctggggagaaacagttcagtgcattgttgttgttgctgtttttggtgttttgcttttcagtgccaactcagcacattgtatatgattcggtttatacatattaccttgttataatgaaaaaactcattctgagaacactgaaatgttatactcagtgttgatttcttcggtcactacacaacgtaaaatcatttgtttcttttgactcaaattgtattgcttctgttcagatgatctttcattcaatgtgttcctgttgggcgttactagaaactatggaaaaaactggaaaataactttgaaaaaattggataaagtataggagggttacttggggccagtaaatcagtagactgaacattcaatataataaaagaacatggggattttgtataaccagggataataaaaagaaaaaagaagttaatttttaattgatgtttttgaaacttagtagaacaaatattcagaagtaacttgataagatatgaatgtttctaaagaagtttctaaaggttcggaaaatgctccttgtcacattagtgtgcatcctacaaaaagtgatctcttaatgtaaattaagaatattttcataattggaatatacttttcttaaaaaaaaggaacagttagttctcatctagaatgaaagttccatatatgcattggtgaatatatatgtatacacatacttacatacttatatgggtatctgtatagataatttgtattagagtattatatagcttcttagtagggtctcaagtaagtttcattttttttatctgggctatatacagtcctcaaataaataatgtcttgattttatttcagcaggaataattttatttattttgcctatttataattaaagtatttttctttagtttgaaaatgtgtattaaagttacatttttgagttacaagagtcttataactacttgaatttttagttaaaatgtcttaatgtaggttgtagtcactttagatggaaaattacctcacatctgttttcttcagtattacttaagattgtttatttagtggtagagagttttttttttcagcctagaggcagctattttaccatctggtatttatggtctaatttgtatttaaacatatgcacacatataaaagttgatactgtggcagtaaactattaaaagttttcactgttaaaaaa

SEQ ID NO: 398 - DNA, 806 bp, Homo sapiens
  misc_feature: Incyte ID No: 398970.3
atagaagattgtcatctatgatcaattattattaattagtggggagaggcactgggctctttgttgagcacttactagggcagaccactgtgcaaagcactttgcttcatgatcccatttaattgtcacagtatttaatgagggagatactcatttctgttttacaaatgaaaacttggaggttcagagaggttgagtaactgactcaaggcgacacagctaaggtttgaattcaagttggtttggctccaaggtttaaccaccaggctgatctgctccaaattgggagcaggagggaggtctgtgggaagagaagtttcccatcatggggagaggagaccctgctgaggaccacggcagcctgaatgtacctgttccagaaatcctcccacccgctctgctctggtggctcagttggcctatgagccctcaaggcagagaccctggctccctcagctctgcacttgtgctcccagcccagggctcagagctgagcagggcccagctcatgtgtggacaaatgaatgagtgctgcctttctttgttgagcagaacaacggctactgcaccgtgggagtcgagcccacctacctgtcctcccagaacggccagcccctgtggatcctcggggatgtcttcctcaggtcctactattccgtctacgacttgggcaacaacagagtaggctttgccactgccgcctagacttgctgcctcgacacgtgggctcccctcttcctcttgaccctgcaccctcctagggcattgtatctgtctttccactctggattcagccttctttttct

SEQ ID NO: 399 - DNA, 1833 bp, Homo sapiens
  misc_feature: Incyte ID No: 1309633.3
attttttatatgaataaatggatggagacaatcactatgaaatgcagtggtcaagagaagattggggcttgagccaaatcttggaggatgagtatggtttttatgggaccatagttgagaatgacttggaataatccaaagagtgtgactgatctggtttgagtggagagtctcaggataagtaaggtgaagtaggatagagagtgctttgaatgctagagaaaggttgacctgtagctaaactcagaagccctctgatttttattgactccagcaaagtttgagactacgtacttggggaaagcacagaaagagctatggtttgacaagagactaatatttttgtgccctgtgtcttattggtaagattcttgaagtggcaaataacaaagaggtctaatgactgcaaactcattgactatttattgacttttgtgttagataacttagaaattcagaattgctgtaaatgttaggttgtgacctagatgaaacaaatagggactttgaccttgccttcgcttgagtgcattctgccttagctctttaaaaagggacttttggtaacagagaagtactttgaaacatattgaataaattagctcagctaatctaggacatttgggttgtacagaaaaaacatgtactgggaaataatttaactgtctgatagaactttctgcagtgaaggaaatgttgcatatctttgttgtccagttttgtagtcattggccattcatggcttctgaacactcgaagtgtgattattatgactgagaaactgaattttaaattttaaattagttttaaaaattttaattaaatttaagtagccctgtgcagctattggcttctgtattggatagtacagctttagaatgtttgtcaacattaatagtaccaaggtagtggtgaagattaaaatgcaatatgaaggcttcagagcacctagcattgggcttggcatatagtatatacctagtaagtagtcacctttttatcaaattgaaacttggaaatggttaaaaatgagatgtatgtaaggggacagtgtgtaaaaactagtgaagtgctgtaaagagctaccagtaattattggcacttgccccaaatagtgtccttctgacctgagaatttcatattaacttaatcctcagggaatttagtgatcatcagggtagcatctattccatttgtttaactggaagaattatctgcaagcttctcagaggaaagttatggtttgtacttttgctctggcaagtaacatgggaagcaaagtctttaacacatacttgttttttttcttagcttgaaggatgccaatgatgtaccaatccaatgtgaaatctctcctcttatctcctatgctggagaaggattagaaagttatgtggcagataaagaattccatgcacctctaatcatcgatgagaatggagttcatgagctggtgaaaaatggtatttgaaccagataccaagttttgtttgccacgataggaatagcttttatttttgatagaccaactgtgaacctacaagacgtcttggacaactgaagtttaaatatccacagggttttattttgcttgttgaactcttagagctattgcaaacttcccaagatccagatgactgaatttcagatagcatttttatgattcccaactcattgaaggtcttatttatataattttttccaagccaaggagaccattggccatccaggaaatttcgtacagctgaaatataggcaggatgttcaacatcagtttacttgcagctggaagcatttgtttttgaagttgtacatagtaataatatgtcattg

SEQ ID NO: 400 - DNA, 638 bp, Homo sapiens
  misc_feature: Incyte ID No: 981662.1
aaaggatcaagagagaaggtcattagtgataaagatctagagttgttgttagatcgaagtgatcttattgatcaaatgaatgcttcaggaccaattaaagagaagatggggatattcaagatattagaaaattctgaagattccagtcctgaatgtttgttttaaagtggagctcaagaatagcttttaaaagttcttatttacatctagtgatttccctgtattgggtttgaaatactgattgtccacttcaccttttttattatatcagttgacatgtaactagtaccatgcgtacttaaatagatggtaattttctgagccttaccaagaacaaagaagtatccatattaagtttagattttcagttaatttttgagactgagtagtattcttggatacaggctgatgtgtacttaaccacttccagatttatacagtcttcctgtggaagtttagtaaatgtctttttccctcctttcttctagtaatgcagttcatgggctttaggtacttcagttatgaagtaggcttttcatggggagagattgggattatgctctctgttgtttaagaaactgtttgattttagagtctatttctatgagatagtttaccaaataaatgttccttataag

SEQ ID NO: 401 - DNA, 64 bp, Homo sapiens
  misc_feature: Incyte ID No: 081187.1
ccgcggcaggcaagagaagctgaggcctgagaacggcccgggccttggcgatgcagcaccgagg

SEQ ID NO: 402 - DNA, 2593 bp, Homo sapiens
  misc_feature: Incyte ID No: 086533.6
tgaggggaaatccctgtgtgcatatgtagaaatgtgtttaagctcagtgaatttaagcagcttttttggcacagttgaattgaaggaaataataagacataaatctaagacgttgttaattgtcaggttttcgtacattgagatctttgaaagaagttgttttgtgccttcttaggtaagcggaattgatagactttaaaatttctatgtgaacataaaaccattggtttaaaaagctaaaagtgcatcatttatcacttgctccccaaagtttttccaaagtcaagaataattatagaactatgagagtcaggatggcaaaatctgtcatccattctcatgggtggttagggctgagaaaaaaatgtgatccactctcatgggtggttagagctgagagatagagaggcttaatttgggtttacctattggctctgaggatccttgaccaaatttttatgaactttaatttcttagggtacccagtggagaaaggtatcaggcaacttaggacctttgagcagagctcgggactcacaaggccattgattgaccagagcaagttggaaaggttttgcaatgtgctgcttggggactttatacattaggcaacagctatacttttgggattattaacgtttatgtctgtgaagatatttaaccaggaatatgttttgttttcttttgaacagttgagccccatatgggggttggcaggcagcagagaggcccctttcaaggtgttcgggtaaagaactcagtgaaggaactcctgttgcacatccgaagtcataaacagaaggcttctggccaagctgtggatgattttaagacacaaggtgtgaacatagaacagttcagagaattgaagaacacagtatcatacagtgggaaaaggaaagggcccgattcgttgtctgatggacctgcttgcaaaaggccagctctgttgcattcccaatttttgacaccacctcaaacaccaacgcccggggagagcatggaagatgttcatctcaatgaacccaaacaggagagcagtgctgatctgcttcagaacattatcaacattaagaatgaatgcagccccgtttccctgaacacagttcaagttagctggctgaaccccgtggtggtccctcagagctcccccgcagagcagtgtcaggacttccatggagggcaggtcttttctccacctcagaaatgccaaccattccaagtcaggggctcccaacaaatgatagaccaggcttccctgtaccagtattctccacagaaccagcatgtagagcagcagccacactacacccacaaaccaactctggaatacagtccttttcccatacctccccagtcccccgcttatgaaccaaacctctttgatggtccagaatcacagttttgcccaaaccaaagcttagtttcccttcttggtgatcaaagggaatctgagaatattgctaatcccatgcagacttcctccagtgttcagcagcaaaatgatgctcacttgcacagcttcagcatgatgcccagcagcgcctgtgaggccatggtggggcacgagatggcctctgactcttcaaacacttcactgccattctcaaacatgggaaatccaatgaacaccacacagttagggaaatcactttttcagtggcaggtggagcaggaagaaagcaaattggcaaatatttcccaagaccagtttctttcaaaggatgcagatggtgacacgttccttcatattgctgttgcccaagggagaagggcactttcctatgttcttgcaagaaagatgaatgcacttcacatgctggatattaaagagcacaatggacagagtgcctttcaggtggcagtggctgccaatcagcatctcattgtgcaggatctggtgaacatcggggcacaggtgaacaccacagactgctggggaagaacacctctgcatgtgtgtgctgagaagggccactcccaggtgcttcaggcgattcagaagggagcagtgggaagtaatcagtttgtggatcttgaggcaactaactatgatggcctgactccccttcactgtgcagtcatagcccacaatgctgtggtccatgaactccagagaaatcaacagcctcattcacctgaagttcaggagcttttactgaagaataagagtctggttgataccattaagtgcctaattcaaatgggagcagcggtggaagcgaaggcttacaatggcaacactgccctccatgttgctgccagcttgcagtatcggttgacacaattagatgctgtccgcctgttgatgaggaagggagcagacccaagtactcggaacttggagaacgaacagccagtgcatttggttcccgatggccctgtgggagaacagatccgacgtatcctgaagggaaagtccattcagcagagagctccaccgtattagctccattagcttggagcctggctagcaacactcactgtcagttaggcagtcctgatgtatctgtacatagaccatttgccttatattggcaaatctaagttgtttctatgacacaaacatatttagttcactattatatacagt

SEQ ID NO: 403 - DNA, 1824 bp, Homo sapiens
  misc_feature: Incyte ID No: 1093481.2
gggctggagccgccctgggtgtcagcggctcggctcccgcgcacgctccggccgtcgcgcagcctcggcacctgcaggtccgtgcgtcccgcggctggcgcccctgactccgtcccggccagggagggccatgatttccctcccggggcccctggtgaccaacttgctgcggtttttgttcctggggctgagtgccctcgcgcccccctcgcgggcccagctgcaactgcacttgcccgccaaccggttgcaggcggtggagggaggggaagtggtgcttccagcgtggtacaccttgcacggggaggtgtcttcatcccagccatgggaggtgccctttgtgatgtggttcttcaaacagaaagaaaaggaggatcaggtgttgtcctacatcaatggggtcacaacaagcaaacctggagtatccttggtctactccatgccctcccggaacctgtccctgcggctggagggtctccaggagaaagactctggcccctacagctgctccgtgaatgtgcaagacaaacaaggcaaatctaggggccacagcatcaaaaccttagaactcaatgtactggttcctccagctcctccatcctgccgtctccagggtgtgccccatgtgggggcaaacgtgaccctgagctgccagtctccaaggagtaagcccgctgtccaataccagtgggatcggcagcttccatccttccagactttctttgcaccagcattagatgtcatccgtgggtctttaagcctcaccaacctttcgtcttccatggctggagtctatgtctgcaaggcccacaatgaggtgggcactgcccaatgtaatgtgacgctggaagtgagcacagggcctggagctgcagtggttgctggagctgttgtgggtaccctggttggactggggttgctggctgggctggtcctcttgtaccaccgccggggcaaggccctggaggagccagccaatgatatcaaggaggatgccattgctccccggaccctgccctggcccaagagctcagacacaatctccaagaatgggaccctttcctctgtcacctccgcacgagccctccggccaccccatggccctcccaggcctggtgcattgacccccacgcccagtctctccagccaggccctgccctcaccaagactgcccacgacagatggggcccaccctcaaccaatatcccccatccctggtggggtttcttcctctggcttgagccgcatgggtgctgtgcctgtgatggtgcctgcccagagtcaagctggctctctggtatgatgaccccaccactcattggctaaaggatttggggtctctccttcctataagggtcacctctagcacagaggcctgagtcatgggaaagagtcacactcctgacccttagtactctgcccccacctctctttactgtgggaaaaccatctcagtaagacctaagtgtccaggagacagaaggagaagaggaagtggatctggaattgggaggagcctccacccacccctgactcctccttatgaagccagctgctgaaattagctactcaccaagagtgaggggcagagacttccagtcactgagtctcccaggcccccttgatctgtaccccacccctatctaacaccacccttggctcccactccagctccctgtattgatataacctgtcaggctggcttggttaggttttactggggcagaggatagggaatctcttattaaaactaacatgaaatatgtgttgttttcatttgcaaatttaaataaagatacataatgtttgtatgagataagaaac

SEQ ID NO: 404 - DNA, 494 bp, Homo sapiens
  misc_feature: Incyte ID No: 024494.7
ctggggaagaggcagatggtaggaaatggagacggagaaatggcactaatggcccagccacctgagatgggatacctgggagggacatcttttcaagtagaggctgtgttggggcatggtgagagagggtcttagcaggtaaccttcctttcctctccagactgaggaatcagagttctgattgtggagtgcctctctctaggacggggctgcagcataggagtctcagctgcttacatccaggtccaggattatgtctgctaacagacgctggtgggtaccacctgacgacgaagactgtgtgtctgagaagctcctgaggaagactcgggaatctccactggtgcctataggtgctgtgtacacaatgtacagcgattacgtcaagaggatggcacaggatgctggagagaagtaggactcctataggagccggggctgtccaactcccctaactcaatccctggtacattcctaataaagcagttttgagg

SEQ ID NO: 405 - DNA, 889 bp, Homo sapiens
  misc_feature: Incyte ID No: 888669.7
cgacccgggcaaggcttcccatccctcccttcctcttctctccttccctccagctgggctcggagtcaggatctgaccgcgggctctgcccaggaagaccgagttccttgagagcgacacctaagcgccggggaagacagggatagaagagacgacagccctttgataagagggtttttagactaacttccacctgtgacgagtgcatggggcctgcgccctgagaggttgcctttccttttcctctcccaccctgggggtttgtggtgatgttaagttctgttaggaccaaggtggatctcagtaaggaggtagagtagatttgtgaacagctgtcggaggtagaatctttgcagacccagagtgggtgggtgtagacactttgccatgggtggtagctttatttgtaatcctcccagtgaaagctttgggaaatccagccctcccaaactcttgcctttcttgtaagactttctaagcgcatggctttgtcgtaagacttctcgtggccatgtgtctcaccctaccgttcgtctcaccaatgaaccagagctgggataccagcaaaaaggacccaaaagactgtttcaccacaattgaagaggtcgtggaccatcccccaaaatgaatcccaacactggaagaccaagagggttgacgtttgctatcttgaaagctgcagcccccgtagagaagatcctagagcagaaggagcacaggctgggctgccatagcatggacccccaaaaagccactgtcatgaagaaatatcctgtgaagaaaatctttgcagggcacctgaactcccaaagccactgaggagaagaattgcaaccttgccaatggacctgatcggttttggttatgcagccctcgtgacatttggaag

SEQ ID NO: 406 - DNA, 1430 bp, Homo sapiens
  misc_feature: Incyte ID No: 428206.1
cggcaggactgaaaactggatatttggtccccatggactttctggtcaccctgtgaagtgggcttaactttttcttgaatcatgtggaaggattctgaagtcaaaagtttttaagactctcaggcttactgtggatctggattctaaggcaacacttccttgaagaaacaagcttacagtctgtggcccagacccaggcaagtggtaaatatttaccttcacgctggagccaagatcgctgcggggagtcccgtgaagcaccactgccctctaagaccttggaaggggaaacaccagaaggtgtgggtgctgagctccgctgcgtcagactgccaggacctgagtggaactcagtgctgaaacctgggttctcactgcagctggatagcagctctgcccggatggccctagtcttcgtgtacggcaccctgaagcggggtcagcccaaccacagggtcctgcgggacggcgcccacggctccgcagcctttcgggcgcgcggccgcacgctggagccctacccgttggtgatcgcgggggagcacaacatcccgtggctgctgcacctgcccggctcggggcgcctcgtggagggcgaggtctacgcggtagacgagcggatgctgcgctttctggatgacttcgagagttgcccggccctgtaccagtcgcacggtgctgcggcgtacagctgctggaggaccgggccccgggcgcagcaggagccgccagcgcccaccgcggtgcagtgcttcgtgtacagcagggccaccttcccgccggagtgggcccagctcccgcaccatgacagctacgacttccgaggggccgcacggggctgcgctacaacccccgggagaacagataagggggacgggcagggtgggcctaggtttgagagccctggggctctcaagatgcgcccagcccatgctggatgaaggcggaagccgaacagggccctttccaatgaatctgccggaaaggaaccaatctttcagtggcagctgattttacaaataatgttgagatacgaatagcaaggtgcttccctcccatctttctacctggtaagaaaaatttaggattttaactcccctaaatgacatttagagaactcgtgttatgcctaattcttcttcctcctcgtgttgtttctgctgttggctctgctttgagctcaagataataataaatatttaggatcagtgtaaagacttggtgttgccgctagattttagcagccctactatactgattctggcctgtaacccctgagaaagccgattttacacggctgggtagaatttgtagaaaagatccacagggcaagcatgctgtatatcagagtgcgtatagcaccattcttcctaattttcagatcaagcttcacagcaaatattaaagattatttaaatttgaaaaaaaaa

SEQ ID NO: 407 - DNA, 2674 bp, Homo sapiens
  misc_feature: Incyte ID No: 1328026.7
taagatgagttggaaaataatgagggagggaccatcccgaccctggatttgaaggatagtttggattttcccaaaaccaaacttgccaacaggttgtgtactgcaggtagacctggattagtgacctaagtttcatcttatcttgaggagagtgaactttgatataagggctcagggaatcccagctcctttgttccttcccatgttggctggagagaagggattccccatgatagccagggtcttcagggcctactgtcacaatgtacagaataaatggatggactaaaagggccaggttgctccaaggccgaatgtgaccattcttcccagagttcactgctccgaactctccttcacagactgaggtcagcctggcccctatgttgtttaccctgagttcctccttggagaaaaaggctttttagaaccgaaataatcattttagtttttcctttcccctgccagggtcgagtatactgagtgatggattaacagaatattactatttttcacctagccaccatgccttggcctcccagaataaccagaaatacctattgtttatctctacatccacttcatatattaaacagccctacaagtgtcacctgtgctgaggattagactctccagaagataggacagtttctggttccagcagccccagaatgtcttccttctctctctttcagcccacaccacccttcctgtaaacactacacctggagcaaagggtgttcagggggataaaggcccaggtgacatccttgtcagacaggcaagtgccacaagtttcatcacaaaaggttgagtcaacaggtgggtgagggaagaggggtgaatcacatctgacaggtaaggaatgtaggcacaggcaggcccagatggatcctgtttccttgaggcagggcttgttccatgcataaaaagccagttggctgggaacactaccaccagttctaagggaccatacagagtattcctctcttcacaccaggtgagtctctttattggaactttttagcatccattctaggtatttaatttttattagagtctccttggcattcttggtatttttttccctcattattgaatttgatcatagccatgcagactgttcaactgaattataacctctaggaatatcttcattttaaagtgttcatactgtaggcttgaagagaatttagacattatcagttcttcattcactctttctgtgtcaggcaagagggggttgggtttattcaaggatccatagtaagtttgtaatgggataatgactagaacccaggtccacaggcacttaccctggcattataattccttcttatttataattttaatacagagaattttattctttcaacagatacttttgtgagggcctactatatttggcaatttgtttgcaaagaaataatttaagcatctatgatactacaatttaatcaggaaataagagctaaaatgcattgtataacagtaacttatcagtgccaggtgattagggcaagttctgtgacagtttgggaatagagaggtttctggaagggtttttctagggaagccactaaaagtcccatatgaacgatctgtggagtttggttagtgcttgaatgagtaggaacaaggaaaacatttaagacagaggagaacttgagccaggccacaggtgggattgcttggggttctagagaggtcagagttatacaatagatgataagccatgctatttatcagaaatgagtgagtagatttaatttgttagggttttttttttccaaaagacctcacattccaatggtcagtattatgagtctcatattcctgctagaagcctgttatgtgctgtgtaggaagaaagagagcaccaggagaggccctgctccagtggagcaagaggaaatcatctttaggttcctcttcttcaaaggctcaggaaattaaattaagtattctttgtggtcaagaaggggaaagaacatagctttttaagagattagaagtggtattcaccatggcttcttccctattattctctgcttaaatcattcttttctttttccaggaccagccactgttgcagcatgagttcccagcagcagaagcagccctgcatcccaccccctcagcttcagcagcagcaggtgaaacagccttgccagcctccacctcaggaaccatgcatccccaaaaccaaggagccctgccaccccaaggtgcctgagccctgccaccccatgagccctgccagcccaaggttccagagccatgccaccccaaggttccagagccatgccaccccaaggtgcctgagccctgcccttcaatagtcactccagcaccagcccagcagaagaccaagcagaagtaatgtggtccacagccatgcccttgaggagccggccaccagatgctgaatcccctatcccattctgtgtatgagtcccatttgccttgcaattagcattctgtctcccccaaaaaagaatgtgctatgaagctttctttcctacacactctgagtctctgaatgaagctgaaggtcttagtaccagagctagttttcagctgctcagaattcatctgaagagagacttaagatgaaagcaaatgattcagctcccttatacccccattaaattcactttcaattccaaaaaaa

SEQ ID NO: 408 - DNA, 3412 bp, Homo sapiens
  misc_feature: Incyte ID No: 475113.7
tgggaccgctgaccgcgcggctgctccgctctccccgctccaagcgccgatctgggcacccgccaccagcatggacgctcgccgcgtgccgcagaaagatctcagagtaaagaagaacttaaagaaattcagatatgtgaagttgatttccatggaaacctcgtcatcctctgatgacagttgtgacagctttgcttctgataattttgcaaacacgaggctgcagtcagttcgggaaggctgtaggacccgcagccagtgcaggcactctggacctctcagggtggcgatgaagtttccagcgcggagtaccaggggagcaaccaacaaaaaagcagagtcccgccagccctcagagaattctgtgactgattccaactccgattcagaagatgaaagtggaatgaattttttggagaaaagggctttaaatataaagcaaaacaaagcaatgcttgcaaaactcatgtctgaattagaaagcttccctggctcgttccgtggaagacatcccctcccaggctccgactcagtaagtaccagttcttgtttatatacagtagtgttttgggcacacctaaggtcgatctgtgttgtatttaaaaatctaatttctttatttgtgtggccttctagacaaacgaaggggacccagaggaaaccccctgacagatctctggatgatcctccttgaatcctgggcagtttggtctctccttgctgtgctcctgtggcactaaactccttttgattggttctttctttccttcccagctagactaagcccctcatgggcaggtaatgaagattgaaaacttttttctgttctccagtgtgagcacattcctcctacatggtagatgtgcaatagatgtttttaaaattggagaatgaaaataaaagaagaaaatcacaatttcttatcaagttgtagcttggtatcatacacaattgcattctgaggaattaaggtggtacaacttagggagatttggtgtgtctgctgtgatagaaaagatttctttttcctagctttccctgaggaaaggaaagatggaaagagggaagccatacagatatccctctgttttgcagtgtagaaactgaatgtgtttctacagggtcaagagacatcagagaaatttttttttttttagaacagaagatcatttcttacatcttcattaagtaaaagaataaatagctcatctctcaagttgaaagaaactgggcttggtattattacaaaagcaaaattaaaatggccatataggttttaggctcattttgccatgcattatgcaaaggacaaagaaaaagaaaaaatagagctctctttacttaaaacatccttaaggagaagctatgaattccccaaagtactacttctctttattatggaataaatggattcccttatacgtgctttgtttagcaatcaaggagaccgcgaaggcgtacattcccgggtgttgcttccaggagaaaccctgaacggagagctcgtcctcttaccaggtcaaggtcccggatcctcgggtcccttgacgctctacccatggaggaggaggaggaagaggataagtacatgttggtgagaaagaggaagaccgtggatggctacatgaatgaagatgacctgcccagaagccgtcgctccagatcatccgtgacccttccgcatataattcgcccagtggaagaaattacagaggaggagttggagaacgtctgcagcaattctcgagagaagatatataaccgttcactgggctctacttgtcatcaatgccgtcagaagactattgataccaaaacaaactgcagaaacccagactgctggggcgttcgaggccagttctgtggcccctgccttcgaaaccgttatggtgaagaggtcagggatgctctgctggatccgaactggcattgcccgccttgtcgaggaatctgcaactgcagtttctgccggcagcgagatggacggtgtgcgactggggtccttgtgtatttagccaaatatcatggctttgggaatgtgcatgcctacttgaaaagcctgaaacaggaatttgaaatgcaagcataatatctggaaaatttgctgcctgccttctacttctcaaatctttcttgtaaaagtttccaattttttcactgaaacctgagttaaaaatcttgatgatcagcctgtttcataagaaactccaatcaagttaatcttagcagacatgtgtttctggagcatcacagaaggtatattgctagttacactttgccctcctgcagtttcttctctgctcccaacccccatctcatagcatccccctctatttccaatgctcctctccaaccgcttagtttctgaatttcttttaaattacagttttatgaaagcatattttatttacttggtgttgaaatagccctcataaaacctaagcacttggaaacacaataatagtattaactaactagatctattgaatttcagagaagagccttctaacttgtttacacaaaaacgagtatgatttagcattcatactagttgaaatttttaatagaatcaaggcacaaaagtcttaaaaccatgtggaaaaattaggtaattattgcagattgatgtctctcaatcccatgtattgcgcttatgttacaagttgttgtcacagttgagacttaatttctcctaatttcttctgcccgaagggtaagtggtgccgtccagcttacacaatcataattcaaaggttggtgggcaatgtaatacttaattaaaataatgatggaagagctatctggagattatgagtaagctgatttgaattttcagtataaaactttagtataattgtagtttgcaaagtttatttcagttcacatgtaaggtattgcaaataaattcttggacaattttgtatggaaacttgatattaaaaactagtctgtggttctttgcagtttcttgtaaatttataaaccaggcacaaggttcaagtttagattttaagcacttttataacaatgataagtgcctttttggagatgtaacttttagcagtttgttaacctgacatctctgccagtctagtttctgggcaggtttcctgtgtcagtattccccctcctctttgcattaatcaaggtatttggtagaggtggaatctaagtgtttgtatgtccaatttacttgcatatgtaaaccattgctgtgccattcaatgtttgatgcataattggaccttgaatcgataagtgtaaatacagcttttgatctgtaatgcttttatacaaaagtttattttaataataaaatgtttgttctaacttgtctgctttttttaaaaataatcttactgtacttaattctaattttttcctcatatttaaataaaaggccatttccacc

SEQ ID NO: 409 - DNA, 615 bp, Homo sapiens
  misc_feature: Incyte ID No: 204392.5
ctgattgtaacaactacagacagaagatcacctcctggatggagccgatagtcaagttcctgggggccgtggacggcgcaacctatatcctggtgatggtggatccagatgcccctagcagagcagaacccagacagagattctggagacattggctggtaacagatatcaagggcgccgacctgaaggaagggaagattcagggccaggagttatcagcctaccaggctccctccccaccggcacacagtggcttccatcgctaccagttctttgtctatcttcaggaaggaaaagtcatctctctccttcccaaggaaaacaaaactcgaggctcttggaaaatggacagatttctgaaccgcttccacctgggcgaacctgaagcaagcacccagttcatgacccagaactaccaggactcaccaaccctccaggctcccagaggaagggccagcgagcccaagcacaaaaccaggcggagatagctgcctgctagatagccggctttgccatccgggcatgtggccacactgctcaccaccgacgatgtgggtatggaaccccctctggatacagaaccccttcttttccaaattaaaaaaaaaaatcatc

SEQ ID NO: 410 - DNA, 532 bp, Homo sapiens
  misc_feature: Incyte ID No: 1092257.12
  unsure 321, 371, 441, 482, 491, 526: a, t, c, g, or other
tttttaaaaaagacgcttccaagttatatttaatccaaagaagaaggatctcggccaatttggggttttgggttttggcttcgtttcttctcttcgttgactttggggttcaggtgccccagctgcttcgggctgccgaggaccttctgggcccccacattaatgaggcagccacctggcgagtctgacatggctgtcagcgacgcgctgctcccatctttctccacgttcgcgtctggcccggcgggaagggagaagacactgcgtcaagcaggtgccccgaataacagctcatgccacccggttcctgcatgcccagangagcccaagccaaagaggggaagacgatcgtggccccggaaaaggaccgncacccacacttgtgattacgcgggctgcggcaaaaccttagacaaagagttcccatctcaaggcacaccntgcgaaccccacacaggtgaggaaccttaccactgtgactngggacggcngtggatgggaaattcgcccgctcaagatgaaactngaccag

SEQ ID NO: 411 - DNA, 1204 bp, Homo sapiens
  misc_feature: Incyte ID No: 1134990.3
  unsure 610, 613: a, t, c, g, or other
gaacttggattacatcaactttggacccattggttttgtcgctgtcgtcaactgacagtgattcatcactggtgatgataaaaatgatggaagaagagttgaaagtcacttttttctttggcctgtccccatctttctgtgacatcacaatgggtctgatctgcatttcacttccagctgctggtaggtctttagcaggcctctggcacctcagcagtcggaggcacagaagctgcaaaagggatcttcgaaactgggcagagaaaaaataaagtggaatattaagtaaaagttgggcactaatctggattaacattcgaggaaatcagttgagctgaatttaagttgttttttgtttgttagcaggtgtggatgtggggttatgtggtcatgctcagatctacctaaatcaccccagagctttatgtcttttattcattctaattcttattaaccggaatatgtaggaccatttcaataccttgtaatcctccaagcttcaatctgcacacactttctatgagggcaggtacaactattaagagattttgaacattaagttagtccacaaatattcagtgggcatctactaggtgacagccactgtggntanaattagagactttttactataagcatcaaaaacagataaggctcttcctggcagagtttacagcctggtgtacttgctaatgtctctttaattaggtgaagaattttttttttctatcgaaattactaatcagttggggaaaaaaatactatagcagacagcactaatgtcatcaacaaacattgttcttctccgtgtcctgggtacaacatccaataatatttcttggcctcctttccgcttctcctctctgctgttcctctctacaagaacctggggggccaacgcctaaagatcataatatcacacaatggaaggaacctagattcctaaatgactgcataggacagatcccatctcctccacccaatacattattagactgaactgtgacctgaaatgagcaataaactctgtattaattcactgaaatgttggggttgcttgttatagtagtcggtccatcatgaccagtaaaacataaatcaaaagttaatgtaattgttatcccattatttagagcgaaataaatgttgaatatatggactttctcagattaggaaataccaattaaaaatataataaatagct

SEQ ID NO: 412 - DNA, 461 bp, Homo sapiens
  misc_feature: Incyte ID No: 1095223.13
ggagtgggtttgcccggtgctgcctgcctaccctagcccagccctggaatgcagctgactacaaacaggataggggcttcctggggagggtgtggcagggtggtgggcatcccctccctcaccaaagcatgggctctttgtttcctctttgccaggcctgggtccttcccagtgacccctcagccttcacttcctcctcactcccggggagctgtgacaggaagaggagatcccagaactggagattgacgtggatgagctcctggacatggagagtgacgatgcccgggctgccagggtcaaggagctgctggttgactgttacaaacccacagaggccttcatttctggcctgctggacaagatccggggcatgcagaagctgagcacaccccagaagaagtgagggtccccgacccaggagaacggtggctcccacaggacaatcgctgccccccaac

SEQ ID NO: 413 - DNA, 2376 bp, Homo sapiens
  misc_feature: Incyte ID No: 214654.1
  unsure 752, 1798, 1821, 1829: a, t, c, g, or other
cgccattgcactcaatgcctggataacagaacaagaccctgtctttaaaatagtaataataattaagcttctgaggatatgtataagagagtgaaaatgctgcccaggtgtgtaatcccagcactttgggaggcctgaggcagacagatcacctgaggtcaggagttcaagaccagcctggccaagatggtgaaaccccatctctactaaaaatacaaaaagtagccgggcctggtggctcatgcctgtaatcccaactacttgggaagctgaacccaggaggtggcggtggcaatgagctgagatcacgactctgagctccagcctgggcgacagagtgtgactgtcttattaataaataaagtaaatacgaacacgtgaacattgacttataaatagttttcataacctcttatgtttgaatcaccatgctagattctgtgaagacagaagagtatcaagattaatatattaatagtatagctctgactggtaaatttcttttttttaatcttccccaatttaaattttttaatttaaaagtaaattttactgtcgaaaatgcaaacttggggagggcggaaacatcacacacaaggtttccacttcacacttggagggttgcatggcggctgggcaaaggtgctccccacttcccagatggtgcggcggctggccagaggcactcttcacttcccagacagaggggcggccgggcagaggtgctcctcacttcccagagggtgcagganccagctctgactagtaaatttctaaggataccagaaaggaaatggcatgcacacacacaaaaaatacctaaattttggatgagaaaatgataaaatatgctaagttctaggctggaaataagggcaaaatgctgtgaaagaagaggaaatgtttacttccaaattaggatgtgacagagaagggatagggaaatcctctctgctcattgggccttacatgatgggtgacacttggagtggcacaagttgggggaaagcgcacttgagacagaggtaatgatggggacgaagtgagaacagagacccagaaggagaatcaatggaccatatttgtaagagctttgaaagccagcctgagaattggaggatttattcataagaaagtgtagagaccctgtgtatttcagagctggatactgccattaccacagatgaaagttgcaatgatctagcagttgtgtgcaaaggcaaggcttgcttttcctgtctttcaaccctatcttgcttttcctgtctttcaaccctatcttgctttcattgtcttcatcttcctgccatactttgtgcacttattgctctccttctgagtcaggacatgtgtacaggagaccaagaacaatgagtattagaaaaaaaggagacagcaaaggtggtttgaggtagtcacctgcttacagataacagccaaagatagaattccaagttataaagcataaaaaagagccaacagaagtaactaatccgggaaaagtgaacatatgggccctttaaagactacaagatttgctagataaactggaaatggagaagttattgcagacagtcatgaaccacaaatcactgtgattaaaattttcttctgatcgtaatccacgaatgcattcattttttggacattgcttacttatcttttaaatgtttcttttattacaaagcctattttgagtagcttttaaaactgaatttcctttaattggtttgaagcctagagatgaatttcgtctttcaaatatctggtgggatggtaatggggattagagaactgncatgagaaaagaggagctgttcnggtattanacgaataaaatcttaagcaaatataggtgtcttttattcttaaaaaatagcagatacagtttatccacatttgtaaatatttgtataaagaaagtagcaaaacagttttggtttaaaaagttccaagtctcattgcaatcattctttgtaaaggctgacttgtaatgaatatgtattaagcaatatttattgactatacaccatctgttctagaagagtttaaagccacttaagaagataaataagatataaaaagaaaacagcagtcaaaagcagatgagaagaaatgggaaaaacaaaaaaaaaagaaaataatgaggctaatataatgctgtgtgtacatgaacatgaatgtgcctgtgttacacattttcaggccacaaatgtttctttgtgcccctgcatgcacaagggtatttccaggtcatttatcattgtgaacagtgttgcttatgataaaaaatagattctataaactctaaatatactttttttctaccactctgtgtaaaagatcatgaacgtaaataaattttagatatgaaaa

SEQ ID NO: 414 - DNA, 1632 bp, Homo sapiens
  misc_feature: Incyte ID No: 086533.5
tgttcttgctagaaagatgaatgcacttcacatgctggatattagagagcacaatggacagagtgcctttcaggtggcagtggctgccaatcagcatctcattgtgcaggatctggtgaacatcggggcacaggtgaacaccacagactgctggggaagaacacctctgcatgtgtgtgctgagaagggccactcccaggtgcttcaggcgattcagaagggagcagtgggaagtaatcagtttgtggatcttgaggcaactaactatgatggcctgactccccttcactgtgcagtcatagcccacaatgctgtggtccatgaactccagagaaatcaacagcctcattcacctgaagttcaggagcttttactgaagaataagagtctggttgataccattaagtgcctaattcaaatgggagcagcggtggaagcgaaggatcgcaaaagtggccgcacagccctgcatttggcagctgaagaagcaaatctggaactcattcgcctctttttggagctgcccagttgcctgtcttttgtgaatgcaaaggcttacaatggcaacactgccctccatgttgctgccagcctgcagtatcggttgacacaattagatgctgtccgcctgttgatgaggaagggagcagacccaagtactcggaacttggagaacgaacagccagtgcatttggttcccgatggccctgtgggagaacagatccgacgtatcctgaagggaaagtccattcagcagagagctccaccgtattagctccattagcttggagcctggctagcaacactcactgtcagttaggcagtcctgatgtatctgtacatagaccatttgccttatattggcaaatgtaagttgtttctatgaaacaaacatatttagttcactattatatagtgggttatattaaaagaaaagaagaaaaatatctaatttctcttggcagatttgcatatttcatacccaggtatctgggatctagacatctgaatttgatctcaatggtaacattgccttcaattaacagtagcttttgagtaggaaaggactttgatttgtggcacaaaacattattaatatagctattgacagtttcaaagcaggtaaattgtaaatgtttctttaagaaaaagcatgtgaaaggaaaaaggtaaataccagcattgaggcttcatttggccttagtccctgggagtactggcgttggacaggccttcagtccattggaactagaatgaaaaggtgtccaacatgggttagaaatttgaatctttgccaaactggaataataaattggttaatttttgtcccttaaaaaatattggaacaaaaccttgggttggttaaacaatggtcaataatttgaaaatggtaataaggtccatataaatagagaaaggacaaagtgaaattgttgctaatttaaaaaaattttacaaatcttactaaaggagtttttattgtgtaaatcactaaagtctttgtagataaaagcagaatggggaagttacggaagttgttccctttactggctgaaaagaaataattcgaaattgtaaaagaagctttttttcaagcattgaaattaaacattatttgtaggggattgcaag

SEQ ID NO: 415 - DNA, 1149 bp, Homo sapiens
  misc_feature: Incyte ID No: 474117.5
  unsure 130, 202-203, 255, 267, 303: a, t, c, g, or other
tccctcattaatagattaaataaattttaacatatactctttgttttaaaatttatttaatctattaatgagggaagcattaacattacaaaactggttttagaattgaagaggctaagtatctataganaggtaggtagaaagaattgtcctttggaattgtattttcttttttttaattataaattgacaatttataatnntataaatttatggtgtaaaacgggatgttataatttattaatacaatatggnataattaaatcnagatagttaacatgtctatcacctcaaatacttagnaaatatctgagttttcactgggcaaagctgctctttcttacaaatgaggcactttttaccactcttttccaaagtttagctccagaggcctcaaagttagtgaaaatttctgccagatttggatcataagttgttcttcttaattattggtggttggtggtgtgagtttctatcatttcctgtagtctcatagttatttttgttgttggaaaaagctgggttagaagccagcaggcccaggataaactatttatagaagtctttgtatttggttctttgttaggaaataatttagacagtaattttttactattttttagatcagcagaaactgagaaaacaaacttgatttattctgtgataagcagatatggaccatgaattaaaaatgcccacattcagacatttagatctaattatcagtgttacttagctgcctgtccaagtttagaaggttcttgacctaaaattcttcccaaatattatttcagacacagatgctcagaaatcatcctattgaatagaattaatttaaaatattttttttccagaaaaatttgcaagaagaaattgacgccttagaatccagagtggaatcaattcagcgagtgttagcagatttgaaagttcagttgtatgcaaaattcgggagcaacataaaccttgaagctgatgaaagttaaacattttataatactttttttatttgtttaataaacttgaatattgtttaaaatgataattttccttcttcaaatgacatggaaagcaaaactttcttttttaaaaattttcatttatttaatggaaacttgcccattttacatgtctgcttatttattttat

SEQ ID NO: 416 - DNA, 573 bp, Homo sapiens
  misc_feature: Incyte ID No: 410812.1
ctgaaatactccaaaatctaaaatttctgagagtagacatgaaactcaaaggaaataggggcattttggattttgaatttttgggtttgaggtgttcaactgacaagtctataatgcagatatcctgaaatctgaaacacttctggtcccaagcattttagttaagagatagtcaacctgtattctatttaatcttaatttacaaacaattctaacaaacatggctgtttgatttccaactccatagcagactcaggaaggaagctgaatgaagagataaaagtgtgtccattggcagaggactaaaggagatttgagcacctgtcagatgggtactgtaccagaagaaaggagcactttgaaagcgtagcttatggggtaggaaagtattttatttaggaaaaaaaacccttcatttattccaaatgataaaatgtaaaatgggtttccataaagtgccagatacatgagatgttgttgattttataaatgatgatcatgtatttacagccttttacagttttttatatccattgacttatttgtgtctttgtctttaaaatctgccattgc

SEQ ID NO: 417 - DNA, 730 bp, Homo sapiens
  misc_feature: Incyte ID No: 011822.2
  unsure 625-626, 631: a, t, c, g, or other
gaacagcctggcaggaggaaggcctgaggaggcagtccccactgaccacagccacctcccatccaggactctctgggaggaaacagccgcacagtgatgatcgctcacatcagtcctgcgagcagtgccttcgaggagtcccggaacaccctgacctacgccggccgggccaagaacattaagactagggtgaagcagaacctcctgaacgtctcctaccacatcgcccagtacaccagcatcatcgctgacctgcggggcgagatccagcgactcaagcgcaagattgatgagcagactgggcggggccaggcccggggccggcaggatcggggtgacatccgccacatccaaggtgcgcctgtgggtctgtgtgagtggcagccccctccggccagcctcacgttgctctgggatcaggccatgttgtgttcaaatccagaatcgggctctttctggctgggtggttgagctaggcactcaccagctctgagcctcctagcattcagctgttaaatggggttgtgatctctgcttcagacagttaccagagatcacaagccgatttcccaaccccaccttggaagagtaggtgggatcccacgagggagaggcacgtgagcanntgagntcgcagggcgcacactaagggctgtggcgtagggctgcgaggtcatgcctgcacccccggaatgggctccgtttccttgtagacctgcatatttgctat

SEQ ID NO: 418 - DNA, 2873 bp, Homo sapiens
  misc_feature: Incyte ID No: 252899.7
ctagtgtccacaaccctgtaaccatacttccacatcttcagcttaggcagacatcgaacctctctgggatgtttccagcaaaagtgagcttttctaatcgtctcattggtacatgggttaatttggtagaggtattcatcagccacacacttcatgttggtttttggtttttaagctaactacaaatctagtaaaaagctatctgaaattcacaaatatcatgtgtgtgcgtgcgtgcgtgcgcgtgtgtgtctgtattcatagtgactgcttttggttttaaccagtttagtatcgttactgtgtggatcgtcgcgctgcagtattgacttggaatcctgaccatgtccatcccaaaattcagtcctcagttaacggatcatgtttgcaaaaggtcactgtgaggctgcatatttcagaaagatgtccttaataagggaagtcaatgtataagatgttttctaaaagacttttcagtattacaactaatactattattatccttctttttttatttagataattcttttaatttaaacaaaggttcactatggaaccagacaaatctcattagccatgtgttaagtatttgctactttaaattgttttacaactgatttcagcacattctatcctttttttttttggaaatggagtttcgctctggtcacccaggcgtggagtgcaagggcacgatctgggctcactgcaacctcagtctcccaggttcaagtgattctccgtgccttagcctcccgagtagctgggattataggcacccaccaccacgcccagctaattttggtattataagtagagacagggtttcaccatgtgggccaggctggtctcaaactcaattcctgacctcaggtggtccaccggcctcagcctcccaaagtgctgggattacaggtgtgagccaccgcacctggcctctgtcctctttaagtctagtgtcgggttttctagcaaacagtaaatttaaacaagtaaactattatggtttccattgcttacaaaatgattttcctttacattcttatcatgaacactattttaagcatcaaatgcaatcatctaaaatataaaggtcaatcatttataatagaaacaccttgaccacaagcccttgattgaacattttataatatttcatctacttattaaaacaaataatttcccttgggttggaggggaagtgatttcataaattaattagaaagccatctttagcatattgcttatgtctggatccatgtttctgaggaaaaagacattctcaggtgatgtatttttttcatgcattagtatgcatttttaaaaaataatgcatgtttctttaataattaattttcatcttctataagatgccatgtgaagaagttgtggaaatgtagaataaaaagctaaagctgccaaatttctgttgaactcttaaaaacagctcatgtttgtttgtcctctcgggttgtggcctagcctatttgcaatgtaatgaagctgcagggttcttgtatagctaaagcgttcaatgcatttcacgtgctgtggtggatgtgggtgctgtagacaggcttcttctcttcctgctctcaaaatacctcggcttgacatttggacagatcctgtcattgtttaagctgagcaaaaaaccacacaaaagttgtgtaagagatgagataacaaaggagcgagagaaatctcatgtgaatttccaagttttaattcgttctccatgaaggattttcatttcagtgaaagtcgcagcagaagagggaactttctggagtttttgagaatgccaaaccacatttttatcacacttctttggaaatcaatgcctttgcatagaaaatcaaattcagggaccacaaagaattttcagtgggaatgtctagtctgaggggtctgaggttgtttttactttaattgtgttgtttaaatattttaaaaatatctttagcgtttggtctttttttttttctgtaaacatttaatttggtctgagaaaagctgaatgtttgggtgtgacgtttgactgaggtggattggggctgcctgtggacattagtgaacaggtggtaggcttcaggaatatccagttttaatcagttgcatttggtacagaattttgagtaatggtgaaaattgttgtctttggaaagcacaaaagaaacctggaaaggcagttcggctcaggtagctacacataacattgtgtatgattttcacttcaaagctgtctggaaggaaatgcagtcagctccagctagtactatttatgtacccagataactaagatattgtttcatggccttgccttagtcagaggcccttttctctgtcctgaacccccaggtatgggtgaaattggaaattactaatctattggaaatcagttcctgacatagtaaagtttgctttcataactgcagcaaaaaaggtcaacttgccaagtcactgctgccatgtgtgtactgtattattttcagaaaaaaatataatagtctgagtccaagttatcttgatttaaaattgatagagaaaagaaactgtcgagcaagttatataacaactaacaacattgcactttctgtatatgaaatcaatatttaaataacttatttttctccattgctgttcttaaaaacattgtaagtagctgtaatataccagtaccaatatgttcttgcaattgcttcagcccaagaaagctgtgtattgttttaaaaattgtaaaaattattgtgatgattcatttagcataaagagaggtggacggaagggttttcctatgtatcaaaacttgtctataattatgtcatctatgtacctagaaaaaagtaaataaatttcttcagttgaatatg

SEQ ID NO: 419 - DNA, 1033 bp, Homo sapiens
  misc_feature: Incyte ID No: 1511488CB1
gcgccaggggttccagctgcacgtcccaggctctccagcgcgcggcaggccggggcgggacgaggagagctgcggggacaacgcctgtggctgggtccggaggtgcgggtgcggcgcgggacaagcgggcagcatgctcagggcggtcgggagcctactgcgccttggccgcgggctaacagtccgctgcggccccggggcgcctctcgaggccacgcgacggcccgcaccggctcttccgccccggggtctcccctgctactccagcggcggggcccccagcaattctgggccccaaggtcacggggagattcaccgagtccccacgcagcgcaggccttcgcagttcgacaagaaaatcctgctgtggacagggcgtttcaaatcgatggaggagatcccgcctcggatcccgccagaaatgatagacaccgcaagaaacaaagctcgagtgaaagcttgttacataatgattggactcacaattatcgcctgctttgctgtgatagtgtcagccaaaagggctgtagaacgacatgaatccttaacaagttggaacttggcaaagaaagctaagtggcgtgaagaagctgcattggctgcacaggctaaagctaaatgatattctaagtgacaaagtgttcacctgaataccatccctgtcatcagcaacagtagaagatgggaaaaatagaatatttaccaaaatatctgccatggttttattttggtaacaagaagcacaatgtcttttttatttttattttttagtaaacttttactgaagtataccatgcattcaaaaagtggacaaaactgtatacagtctgatagatatttatgtcgtgaacacctgtgtaaccactgccaaagtgaagatgtagaatattggcaacacttcacagcctcattcctgccttttctcagccattacctcccaaacatagcagtttttctgagtttcatcacctttgattcattttgcctgtttttgaactttatataaatggatttatacattaaaaaaaaaaaa

SEQ ID NO: 420 - DNA, 1175 bp, Homo sapiens
  misc_feature: Incyte ID No: 1383797.1
  unsure 21, 80, 83: a, t, c, g, or other
caaaagttttacagtgagatnacaaagttcaaatattatctgtagtatacaagaactagataaaaaaaaaaaacacatgntgnaaaaagggtgcctactatttaaataccctatacctgagttacaaatcacctaagcacaattacaaataattcagcctagcacccatgcaggacactggctagtacatgggtagccagcagagcctcttagcagaggcaaaatcaattgcatttcaaggaaataagtctcccagcatcagaatgcagagatggattctttcctcccctcacttggtccctaattgttctctttacaacactagcagatgttggggctcagaaaacccaaagtgaaggcctcagaagcaaagtttttctctgttcagattattcttggtctctgtgcagcattccttcctcctggatatagggcagggcctgtatgggatggggatattataacctgctatcaagcaaggtaggtcagagaatttatttatggccagctcttacatagttaggtgaggaaagattagagtactatctttaagatgtaagtctggcattgtggaaagatggttccagtttctatgacctaccttggggaagaggaattcaagtttctgtggcttgccttcagggagaatgaggctgagacaggagggcaggataacatcagagaaaaactttgcttctgaggccttcactttgggttttctgagccccaacatctgctagtgttgtaaagagaacaattagggaccaagtgaggggaggaaagcatccatctctgcattctgatgctgggagactatttccttgaaatgcaattgattttgcctctgctaagaggctctgctggctacccatgtactagccagtgtcctgcatgggtgctaggctgaattatttgtaattgtgcttaggtgatttgtaactcaggtatagggtatttaaatagtaggcaccctttttgcaccatgtgttttttttttttatctagttcttgtatactacagataatatttgaactttgtcatctcactgtaaaacttttgttcatttctcattatggtaataaatagctattataaccaacccatttattcaaatatgttatttccctaagtgttatttgacattttgttttggaaaaaataaatcaccatagat

SEQ ID NO: 421 - DNA, 1385 bp, Homo sapiens
  misc_feature: Incyte ID No: 400745.1
cagcctttcaaattaccagtttctgttccagggatctggccattacaactcttattggtgtaacaatgaatctgaatggtgcctaccctaagctggtgcctttcagacctgcaggacggctgatctctccacctctgctactctctgtgattttcaacattcttctcagcctggccatgcatattgcaggcttcatcctggttcagaggcagccttggtattccgtggagatacacagtgcctgcacagtacaaaatgaaagcatctcagagttaaccatgtctccaactgctccagaaaaaatggaaagtaatagcaccttcacaagttttgagaacactacagtctggttcttgggaacaatcaactgtatcactgtggctcttgtgttctctaaaggaaaaccatttagacagccaacttatacaaactatatatttgtccttgtgctgataatacagcttggtgtatgtctattcattctatttgctgatataccagaattatatagacgtttggatctgctctgcactcccgtcctgtggagggcctccattgtcatcatgctcagcttgaatttcattgtgtcccttgtggccgaggaggctgttattgaaaatcgagccctgtggatgatgattaaaagatgtttcggctatcagtcaaaaagccagtatcggatatggcagagggacttggcaaatgaccctagttggcccccgctaaaccaaacctcccactctgacatgccggagtgtggcagaggagtgtcttacagcaatccagtatttgagagcaatgaagaacaactctgaaggacatgtgatatccaagttgatattacagagaaacaatgacaaaagggaccagtttcattgattttaagaaatgagactcttgtaacatcagctggagttttggggctacctatcaaatcatggtgacaaactaaagtctgtttgataaaatactgtctacagagaagaacattgacccagaagagtgctttcctcttggcttctgaaggtattagaggcattcagtgaaggcaagaatgggccaagaatttctatgggccaagagacaagcaggctaaaggggaaaaatatgtgatctttcctcttaggacaggacaatactttcctttttataaaaatgagttgaggggaagtagtactgtgtatactcacggagttgtaatttttgaatttttacttcatcgatggaaaaactaatgcgtgggaaacattacaccaatctttactgtctgggttccttttctctgtagtacttttcagatttgaggctttttcttctgtttctggccttacccaacatattgttaaggataagcttagcctatgctgcaataaaaaacaactctc

SEQ ID NO: 422 - DNA, 798 bp, Homo sapiens
  misc_feature: Incyte ID No: 029618.1
atcggaaagttggcggggctgcgggagctgagcctagagtccggctgttggctagagtgggcgcggatctggtgtggggaaggcggcgggactcaggcctgcctgcgaagcattgtcctacataatggtagaggacgaactggcacttttcgataaaagcataaatgaattttggaataaattcaaaagtacggacacctcctgtcagatggcgggactaagagatacctacaaggattccatcaaagcatttgcagaaaagctgtctgtgaaattaaaggaagaagaacgaatggttgagatgtttctggaatatcaaaatcagatcagcaggcaaaataagctcattcaagaaaaaaaggataacttgttaaaattgattgctgaagtaaaaggcaaaaagcaggaattggaagtactgactgcaaatatccaggatcttaaggaagaatattctaggaagaaggaaactatttctactgctaataaagcgaatgcagagaggttgaaaaggctgcagaaatctgcagacttgtataaagatcgacttggactagaaattcgaaaaatttatggtgagaaattgcagtttattttcactaatattgaccctaagaatcctgagagcccatttatgttttccttacatctcaatgaagcaagggactatgaagtgtcagatagtgcccctcatcttgagggcctagcagaatttcaagagaatgtaaggaagaccaacaatttttcagcttttcttgccaatgttcggaaagcttttactgccacggtttataatta

SEQ ID NO: 423 - DNA, 1299 bp, Homo sapiens
  misc_feature: Incyte ID No: 245722.8
agatggggcagctgctgggtgaccaggtcccgtagctcagaaggggtcagcgtctccttcccaccctccacggagtactggtgaaagttcttgatgagggtctcaatggccctctccacatcactgaattcctgagcatcctctgcgttggctgaccgacactgtcccatggtgcccactgtgtctggtcctttggtgagagttctgttgtcctatagctggccccagaggagctgatggctcctgtcttgtctcagcggctgccaacagcagatcatgagccatcagctcctctggggccagctataggacaacagaactttcaccaaaggaccagacacagtgagcaccatgggacagtgtcggtcagccaacgcagaggatgctcaggaattcagtgatgtggagagggccattgagaccctcatcaagaactttcaccagtactccgtggagggtgggaaggagacgctgaccccttctgagctacgggacctggtcacccagcagctgccccatctcatgccgagcaactgtggcctggaagagaaaattgccaacctgggcagctgcaatgactctaaactggagttcaggagtttctgggagctgattggagaagcggccaagagtgtgaagctggagaggcctgtccgggggcactgagaactccctctggaattcttggggggtgttggggagagactgtgggcctggagataaaacttgtctcctctaccaccaccctgtaccctagcctgcacctgtcctcatctctgcaaagttcagcttccttccccaggtctctgtgcactctgtcttggaggctcaggggagctcatgggtggaggagtctccaccagagggaggctcaggggactggttgggccagggatgaatatttgagggataaaaattgtgtaagagccaaagaattggtagtagggggagaacagagaggagctgggctatgggaaatgatttgaataatggagctgggaatatggctggatatctggtactaaaaaagggtctttaagaacctacttcctaatctcttccccaatccaaaccatagctgtctgtccagtgctctcttcctgcctccagctctgccccaggctcctcctagactctgtccctgggctagggcaggggaggagggagagcagggttgggggagaggctgaggagagtgtgacatgtggggagaggaccagctgggtgcttgggcattgacagaatgatggttgttttgtatcatttgattaataaaaaaaaatgaaaaaagtgaaaaaa

SEQ ID NO: 424 - DNA, 3034 bp, Homo sapiens
  misc_feature: Incyte ID No: 981488.1
  unsure 1443: a, t, c, g, or other
cacaagtatatgaggggttgtgtaaaaattatttttctcttgctgtactacaaagagatagaatcaaactgctttttttcgacatactggtttttctttctgtttttcttctctttcttctatttcttgtggatattatggctaataacacaacaagtttagggagtccatggccagaaaacttttgggaggaccttatcatgtccttcactgtatccatggcaatcgggctggtacttggaggatttatttgggctgtgttcatttgtctgtctcgaagaagaagagccagtgctcccatctcacagtggagttcaagcaggagatctaggtcttcttacacccacggcctcaacagaactggattttaccgccacagtggctgtgaacgtcgaagcaacctcagcctggccagtctcaccttccagcgacaagcttccctggaacaagcaaattcctttccaagaaaatcaagtttcagagcttctactttccatccctttctgcaatgtccaccacttcctgtggaaactgagagtcagctggtgactctcccttcttccaatatctctcccaccatcagcacttcccacagtctgagccgtcctgactactggtccagtaacagtcttcgagtgggcctttcaacaccgcccccacctgcctatgagtccatcatcaaggcattcccagattcctgagtagggtggcttttggtttttgtttctttcttgtcttgtcttttattgaaaggaaatcaaaaataggctaaacagaattttgagggcatggcccaaataactcatgagttccaagttgaaacatggttgtgcaagttggacattacaatgtaaaacacattttcttcaaacacgttttcccttttgtttcaaaaaatgtaatattttcccccaagcgttttatatttatgtattttgtattcaatgtgaggcttattaaaaatagtgattctaatgtaagaatcagctaagatgcattatatatattttaattaaaattaaaacttcagatatttgtggattacaatcctcatttacttccaatgtgactaaaaagagaaaaaaaatcactgtgtcactttaaagaaaaatcttctaagggatttggattttactttctttagaatgacaagtgaatcatattgacattttacaatcttagatttttctttttttttcttttgagacagggtcttgatccgtcgcccaggcgggagttgcagtagcatgatcaggactcactgcagcctctatctcccaggctcaagtaatcctcccatcttagtgccccaagtagctgggactacaggggtgcactaccacaccgggttgaatttttttttaattttagtagagatgaagtgtcactatgttaccaaggctggtctcaaactcctaaactcaaatgatcctcctgcctcgngctcccaaagtgctggaattagcctggccaatcttggatttttaatggaatatgtgggcacaaaatgacagaacataggacattctaaagttccttgatttgatcattataagaagtgtgggactcaagcacaggaaactgaactcttttggtgtcattggatgtttcatttttgacactaattttttctggacaaactctttatgtgtttttcccaagaatagttatctacttcctggaggcaaaatccttggatttactaacatgatgatttaccttttcttcaccgttgtcgttacattgttagaaaagcaacaggaaaaaatccaattcatttgacctaaaaacaagcctcaagtttaaaaccaagctcacgtttttcttaagggaaaaattttctttcttaaacttacatctagcaacttggaaagcactttctctggggatcttcttttgtaactttgcagacaaataagtatgagtcactggggagagagtttgttattgaaatagatgttgcccatgaagaattctccttcctggattgactcttaatcatcaggcatcattcctggtttgcttctctacgaatctcaattccaacttctctgcagagtctgtacagtgattaagccatgccagatggtctttggtgcacacagttatttaagaatccacttccacaggtggctgcccttgtaaggaagaatgcatccctaaatgtggccaccagagagttccagtgggcagatgtctgtggctgcccttctcatttaaggacatgagttcactggagtattactcaaaaagtctgtggtccatttccagtattgtgaatatttagtttatgtggccgtttctttgtttctttgaacagtgggattttcagtgaaaaagtaccctctttttcatttcctattgcagtggtcacagctaatagtgtctgaacatggttcaagaataagagattccatgtagcattttctttattattttcatttcccttatattatccatcattccttaaggacaattattcttaataatgcttatagaaaatgttctctaattaaacatgccaaaaggaaaaagtaagggaaagaggggagcaagaagaaaatggaagaaaaagggaaaaaagctaaccggataaccaatttgttataagttggttttcaacaaagaaatttagcagccaagtaaggtttcaagggaatattaacttggtatcagggctacttttttttttttttttttacttgcatgtcatccttaatgtctaacatgaaaaatcagcaaagagtatggtttttatcaagaatttgtgttgggagtaaaaactgctttatagctcccaaattaggaagagaagagcagaaatcctctggggcatttaaccatctggcagaattgttgctgcacccttatcccagttataagacagtcaaaatgactatttcctaaatattgtgagtgtatgaaatgtgaaattaaagcaaaaactggagacttttaatgtatttctttaatttgaaatgttttgtggattgtgaaataaaaataaatttatgtcaagttttattcaaaattc

SEQ ID NO: 425 - DNA, 383 bp, Homo sapiens
  misc_feature: Incyte ID No: 241858.1
tgtctgtaaaaggtataactgtcctggtgatgctgtacagaggctcttggctcttggggctcagctttgcctcaatgtggcttcacgtggcgggcaccctggtgcccagagagagaaccagagctgtccgtcctgcagatggacacaggggagccacagcacggctcgcgctggtgcccagagagagaaagagtgaagctgctgaccctgaaggcaaggcagagtctgccatgcagctgcagatgtcggggtgacaggagccgcagagccggagcaaacggctgagataagagcggacagcgtgagagaagctgcccatgaaagcgctggtgtgaaaaagctgttaatgaaagcggctgctgaataaaaccatattcacctgc

SEQ ID NO: 426 - DNA, 943 bp, Homo sapiens
  misc_feature: Incyte ID No: 1466276CB1
cccacgcgtccggcaatccgagttccggatgagggaacattctgcagtataaagggagcagggaaggcgggagacagcgcagtttgaatcgcggtgcgacgaaggagtaggtggtgggatctcaccgtgggtccgattagccttttctctgccttgcttgcttgagcttcagcggaattccgaaatggctggcggtaaggctggaaaggactccggaaaggccaagacaaaggcggtttcccgctcgcagagagccggcttgcagttcccagtgggccgtattcatcgacacctaaaatctaggacgaccagtcatggacgtgtgggcgcgactgccgctgtgtacagcgcagccatcctggagtacctcaccgcagaggtacttgaactggcaggaaatgcatcaaaagacttaaaggtaaagcgtattacccctcgtcacttgcaacttgctattcgtggagatgaagaattggattctctcatcaaggctacaattgctggtggtggtgtcattccacacatccacaaatctctgattgggaagaaaggacaacagaagactgtctaaaggatgcctggattccttgttatctcaggactctaaatactctaacagctgtccagtgttggtgattccagtggactgtatctctgtgaaaaacacaattttgcctttttgtaattctatttgagcaagttggaagtttaattagctttccaaccaaccaaatttctgcattcgagtcttaaccatatttaagtgttactgtggcttcaaagaagctattgattctgaagtagtgggttttgattgagttgactgtttttaaaaaactgtttggattttaattgtgatgcagaagttatagtaacaaacatttggttttgtacagacattatttccactctggtggataagttcaataaaggtcatatccaa

SEQ ID NO: 427 - DNA, 2899 bp, Homo sapiens
  misc_feature: Incyte ID No: 999386.3
ccgcctcctcttcccgcaggacgggacagcgcccctgtggatcgcgtcccagatgggccacagcgaggtggtgcgggtgatgctgctgcgcggagccgaccggacgctgcgcggaacgtgagtgcccgagtcgcgcggccaaagagcgaagcctcccggcgcgcctgtgtggagaaaacgggtcttgactgagtctgcagcccacatgggtttcctcccaacctccttccttgagcaggaaaacaaagtcaaggatggcacaacagcattattgaaagcagccaacaaagggtataatgatgtcataaaagagttgcttaaattctcacccactcttggtattttgaagaatgggacatcagcgctccatgcagcagtgctcagtggaaacattaaaacagttgcgctgctcctagaagcaggggcagacccatccctgagaaacaaggtgcgatggcagaactgattgggccagattactggtctgggtggtgtcgctgatccatcaagtgcaaggccaatgaacttccggcagaactaaccaaaaatgaacgtatattgcgtctcctgagaagtaaagaaggtcccagaaagagctaacttagctccatatttgacagaaagatagaaagcttaaccacattgtccaaaaagaaattgcatttcaagcagtgttggaaattcttttatgaaaaaaaaagatgcccagaatgcccatcctgtgggtccctgacaaagaagagctacgctctgtgcacgaagtcaagaaccaaacagctcagggaccctcttgccccttcaccatggacttctcatggtgtcctgtaactcatctcccggggggcctggcatgttcacagattccacagaaactcattttcaacaatgctaacttggacctgtcagttaaactctaaggtggacagggttctcagtactaagcaaggagacagaatgctttgttcctttaaaagactgaaaagctgaccttcaatggattgaggcacttttgcttttgtgttaaatgtagatgtgctaaaatatatagatctatcatattttacctacatatgtatgtcattccagtataaaacattctcctctacccaagaaccatagccatgattgttataaatcaatgaagtgtaaacatacattattaaaaaaccacttctgacattccattatgtgctattcaaagatggactattgaactatagaaaagacagactgtgcatttgttcgttgatcctcatcttattcctgacatgtaaaaatcaattttacgtagagtcaacattgtaggtaggttaaaataccagtggcaaatttggaaattcagaaacttataaaccacgagaaatatataggcttgtctctttggtcttttattttggctctattgttgggaatctatttcctattccataagtaagtatacctaacatgctgtggaatcttgagtttccaacaccgtgctgcttgatagaatgactttgaggtccttggataaaatgtgatatatgcaagtacagtatgttgctattactattgcaggaatataaataataaaagactgttattagcacttagtaagtcttcatctatgcatgtttttgagttgactgattccaagaatgaaatatgaggtttattgaattattcctttgaaagggatcaaaacttatattcaatgcactttataattaatggtgtctaaatgcctcagtcagtgcctaactgcacatacaaaaataaaaccttctttctgtaatctaccaaaataaacgcaatggtatttctgctatttaaacacatctttagcttatttcttcatgttctgctctggttttcagtcagtgtctatgtaaagacacttttagaggaaaatgttgtaatcccaaaagaatttttgtttaaccaactttcagagttactaaaaggattatctttaattcagtaaataatagaatataatcttcaaaattagaagatattctcttaaaatttataacaattaatgcaacaaaaatcagcatattttgataaatgtctcaagcaaatgagcaactcacaggccccacaggtgcctacagcctgaccagctatacaaaaagcctgcaacctgattctaggataaaatattagaaagctctctgttgctaaaacatccagatataaacattttggtggctaaaatcaatgccatttcctcattgacattcttttattcagcaaatttgtacaaatatacattttctcctgtgcgaatttcaaaaagctatattcattttgaagaggaaaataatatggcattaaatgctttgtattttccccttagttagcccttatggcaaaaatagttgctaatcactgatacaaagcaaaacgttatgggtactgataacaaagttccaaaagccaaaatgggatgaatcacaaacttactgtttttcactaaaacatgtaattggcctattacatcaatagttttaagtgggtaatgttcttgaacaatattagagccataaaattgaagccagtagcttgaacaatatggaggccttcttactgtagggaagaggtgtctagcttagaaggatcacatttgatctagatgagattacccatagcagggaaaatgattcatcacctaccaaagactgtacggaaaggtgtgttattttcaaaattgcattttagtttgcacacatgtaaatgattattctatgttaatctaattgacaattcagttagctccgcatcctaagacttaaaactagcaattcctatgcaaatcatctgcttaactgaactacaaacgtttttcattaattcattctttgatgacatattccatgttatataataattcaaaataaagttaatatactacccc

SEQ ID NO: 428 - DNA, 1372 bp, Homo sapiens
  misc_feature: Incyte ID No: 1091079.8
gggaggtctggtgagtctctctcctaaatgacaaaagttggaggaggaacaaatgaagcgacagaagggtgcagggcagagggagaggatctgtgggtctcctgggtgtggttttaatctgtctccccctgcccagttcctccagctcctccatcctgccgtctccagggtgtgccccatgtgggggcaaacgtgaccctgagctgccagtctccaaggagtaagcccgctgtccaataccagtgggatcggcagcttccatccttccagactttctttgcaccagcattagatgtcatccgtgggtctttaagcctcaccaacctttcgtcttccatggctggagtctatgtctgcaaggcccacaatgaggtgggcactgcccaatgtaatgtgacgctggaagtgagcacagggcctggagctgcagtggttgctggagctgttgtgggtaccctggttggactggggttgctggctgggctggtcctcttgtaccaccgccggggcaaggccctggaggagccagccaatgatatcaaggaggatgccattgctccccggaccctgccctggcccaagagctcagacacaatctccaagaatgggaccctttcctctgtcacctccgcacgagccctccggccaccccatggccctcccaggcctggtgcattgacccccacgcccagtctctccagccaggccctgccctcaccaagactgcccacgacagatggggcccaccctcaaccaatatcccccatccctggtggggtttcttcctctggcttgagccgcatgggtgctgtgcctgtgatggtgcctgcccagagtcaagctggctctctggtatgatgaccccaccactcattggctaaaggatttggggtctctccttcctataagggtcacctctagcacagaggcctgagtcatgggaaagagtcacactcctgacccttagtactctgcccccacctctctttactgtgggaaaaccatctcagtaagacctaagtgtccaggagacagaaggagaagaggaagtggatctggaattgggaggagcctccacccacccctgactcctccttatgaagccagctgctgaaattagctactcaccaagagtgaggggcagagacttccagtcactgagtctcccaggcccccttgatctgtaccccacccctatctaacaccacccttggctcccactccagctccctgtattgatataacctgtcaggctggcttggttaggttttactggggcagaggatagggaatctcttattaaaactaacatgaaatatgtgttgttttcatttgcaaatttaaataaagatacataatgtttgtatgagat

SEQ ID NO: 429 - DNA, 598 bp, Homo sapiens
  misc_feature: Incyte ID No: 407084.1
aagaggctggtacatcctactttctattatcttattatcaatagactaaattagaaaaaaaattagcattgtttaattatgagataaatgacctataaacctaaatatttaccagaaaagagcagagcagaactaaaaggatcaggaatccaggataacatcagtcatacagcaggattcaaaccctctcctaaactaaattccaggcaacacacaacttactcaactaccaccaaatcccagatccaggtctcagggaagtacttccggactatctctttcacttgcaatatctgaggttcttcttcgatcattgggtacattatttctacggctcctgggggtacacctcgcagacctggtcctggaagacaacacacaggcctcagtgtgaacctcatttttatcatcaatttcttattgctgccttatttctcaaatggaataaggtcatacgctcagggaatgtttattattggaacaatttaacctaccagcttgttattttgttcactttcctataaaaaggctaatcctattttttctttaaatagaatctagagctaaatatatttttctttataaataaaaacaaatg

SEQ ID NO: 430 - DNA, 2849 bp, Homo sapiens
  misc_feature: Incyte ID No: 215642.2
ccagaatgattgcctctactgtcctcattgacttgtttgaaccttagtgccttaccctgtcctcttcccagttctctttatagaagctctaggagctttcgaaaagccaaagtctttctgaagaatctgtgctggacagacataattccctttctcattgtctccatctttgttggtcatggtaaggtttttccatcagcctctgaaaaaatagttgtgcacaacatctgctcactggactgtctgatccaatgtaattggctgcgtctggctaattctaagcactaaagtctacatctaagctatagatttaagcttgaagctacagattatatcactatcaccaccacccctcaccctatgcaatcaatcaatcaatcatcttaagttaaagatatttgttgtctttgaatgatttgctgtcacagactatttggtagaagaaatatttttcacctgagagaggaagagaaatttctctagtaacacaaagagtgagttctaaaaggcatgcccacatctctttcgtgccttaaggatagtgagatgcacacttatatatatactgtatatatttatatatttatatatatattgcatatatatatataatattgcaagcttaagtttgcaatttcccaaacaatacaaaaagcaaattacacaccctcaccactgttcttatctctatagtgatgaaacattaattagggatcttgctgcttttctttttctacacgaagttttcattaaagccacagaataattgatagggcagctgtttgagaacaggtcccattttcacattagggctttaaatgaattagaaactatttgaggctataaaaatgtccttgagtttggagcctgagctctggtgaaatgctgatacatctgatctatcatgggaattgcagttagagagagtaaggaataccatttagtcatctatccgttcttcacttagcaggaatatgaaagaaaggcacatgtttaagaggaatacctaaaggtttttctaaattccaacatttaaaaggcaattgtgggctatttttattttttaatattttgaaataaagtttagtgtctagggctgggagccaggactgatcttccatttctttttctttgttcccagccatgcttttgtaacttgccaggtggacttgaccaactacattaccatgctgtgcctcagtttacccatttgtaaaatgggattaataatacttacctacctcacaggggtgttgtgaggctctattcatttgctcctttattctttcctgtattctctgtatgtccagcactttgtagccatgggaggaaagggactataaaagtgtacaatgttaatggaatgatacggtacctgaaagccttgttttctagtaagaaaatgctaccttgctgtacatacttataaccttgtatttggaaatgagaaataggtttatattttcagatctctcaaaaatcacatcatttgaccaaagaataatttaagacacatagaacagatttttttaatttatattttcatcctgaccagcttagttctaataatttttagttgtgagtgattaaaaaactttggatcaattttggtcaaacatgccaactttgtagtctgagtgacaggcaaggatttttgggtttaagatgcacttttagcacacatttgtatttcccttggcatatcagattgagctaatggtgatgttatttcaatctaacagccaccaatctgaaattgtatttcaaatgttgattctgtagttctttaaataataatgaagctcatcttatacattttgctttcaccaattgattccttcttcttttagcccactattaaaacatttcttactgaatggttcatgtaggcttgctgaacagcacgcattacttgcttcctgaagagttcccccattcatccatttgtcccattagttgctgtggattatcaagttttgaaggaactgtacatcccaacagactgaaacattctaagtgaaatgagtataatccaagtaactggtgaactttggaggtttggagcttgaagagaatggctaagaagatttgaattatagggagggaacagaaatcatacatgaaaaggttttactgagaaggggaaaaccttagatagagggacatgtgaaacaaaatcatttgaaattttgattcagacatccatttccagtggcaaacagcaaagcctgaacccataaacccaaatgataggtgaagttgggtggttttatccaatgtctcaagcaagcaatgtctgggaatatcatagagtaacaagtgctggtcagccaaagaaacattcactgctggtgaaccaataccataagcatgtattatctaagcacttgatcaagaaatatacatgttgtacaagctctcaattttgttcatttattatcaaatttttaaaatacaagtttggtatgtgatttggaaaagatgccttctggatcttaagccagttgtcagtggaggtcctcagggctgcaaatgtcaagacataaccctgttcctcaccatcatgataccagatacaggtgaatacataggaactatctgcctgtgtcctcaatctcccttcaaacaagatgctgatttgtagggtacttggcaggttaaattaaaccagaagaggtgacttaataaaaaagggaatgacatttagggtataaagatctcataagaaatgtaatatgtaaattatatcttgctttatgttgtaaaatatacattgtttgcgctagaatagaaatgatttcttttcaataaaaagaaagaaggactctaccatgtcttttgttatatac

SEQ ID NO: 431 - DNA, 805 bp, Homo sapiens
  misc_feature: Incyte ID No: 1159769.1
gtttcctgcttatgcaatagtagctgggagaggccgaaagaattctggtggggccacacccactggtgaaagaataaatagtgaggtttggcattggccatcagagtcactcctgccttcaccatgaagtccagcggcctctttccccttcctggtgctgcttgcccttgggaactctggacaccttgggcttgtggaaggactctggaaagtcccttcaatagctggagtctgtccctccaaggaaatctgcccagatgccttagcatacaaggaaacctgatgtgccagagtgactgggcagtgtccagggaagacgagatgttgtccctgacacttgtggcatccaaatgcctgggatcctgttgacacccccaaacccaacaaggaggaagcctggggaagtgcccagttgacttatggccaatgtttgaaggcttaacccccccaattttttgtgagatgagtatggtccagttgcaagctgtgacttgaagtgttgcatggggcatgatgtgtggaaatcctgtcgatttcccctgtgaaaggtaagcaggggatgagggcacactgagctccctccagccctctcagcctcaaccctctggaggcccaggcatatgggcagggggactcctgaaccctactccaagcacagcctctgtctgactcccttgtccttcaagagaactgttctccaggtctcagggccaggatttccataggatcgcctgtggctttgattctattctagtgtctctgggtgggggtcctgggcaagtgtctttctgagtctcagtttctt

SEQ ID NO: 432 - DNA, 2078 bp, Homo sapiens
  misc_feature: Incyte ID No: 482336.31
  unsure 2074: a, t, c, g, or other
cctaaggggccagagagagacatgacggaggatgaatggagcagcagggaagggaatggggagtgaaggggtgctagggccgagggcctgggtgctgggaggagaagaggagacaccagggccgcaggtatgagtaggaggcggagaggaggaggaaggggctttgcccctgctgctgacccgccttctccctgggttagcacccagtcttctttgtgggaagaagaattaacaccaaaagtctctgggaacacagaagctgatctgggcacagggagctccagccaagatgcctctctctgctttcgcctctcccataggcacagggcccccaaattctctacaacccataccctgggccttctgttgtcatagaagtcagagttgggggactcttagagtggtacctgatctggcttcctcccatgggaagaaaaggggactgaagctcagaaatggtcagtagtgtgcccaaggtcacacagcacgcagagacatcctcttctgaaagcttaatctcagtctgagctgctgtaaccaggcttagatccgggtactctgagaggatatggttcccccaaccctggggggatatggaggtagataccttgcttttatctcttaacttatcagagttgtggtccagaaactcattcaaactgggaggcctactttaagaatacaaagttaccaaaaaaaccccacttacttagaatgagaaaagtcacacagatcactagagccttggacattcaggcctcttctgtctgagttccttaggcatcgtaccagaaattcttcgagttgctgcctgactgcaacctggctccctctccccacccacaagtgccagcaactcccagcaccagcaggggccatttaagcaagccccctggaagctttcagcaaacctctctctttccctcagcctttgctctgcctgcttcctgggcttggggccgcagaggccagcgaggctcccttcattccctccaccaaagtgaggtcttccctgcccccacagagcaaactgatccccaaggccaaggccttggtgacaatgggactgtgagtcacaaaacaaacatagccagctgtcccgaatggatttttaatttctactgcaagacctgtttcagccccactggctgcttaaagccacccccactccctgctccttccttagtcctggctggagccccattcaatcagtcaacgattcacgaattattttgacatatattaagcaatgacttctccaggcctcatactggggataaaagtatcaataggccacagacacctttaggattttatgatacggtgaggaaaggcagccatctacataaataacacatacagctaccatcaccgaatcccaggtgctcagggctttagacagattatgtcatttaaacctcacaggcccatgaatttggtcctgtagttgggcccaagacataggtgggaaatggaggccctgagacattgcctggggtcaggtggccagtggatagaagggccaaggtgaacactcccttcctgcatgcctcctcgctccttttacaaggctgaaggcaggctggaagtgtggggcaagaaggaaaaatcaatgatcctgcttggggcctggaaggagagagggctgagagcgcttccctcccacgctaggaaagagccgtcctcactgtctgtcctctgcccccaggttggctggagatggagtgggagccgtgaatatctctgtgatgaattccactggtggcagtagcagtggcggtggcattgggctgaccctcgggggaaccatgggcagcaatgccctgagcttctccagcagtgcgggtcctgggctcctgaaggcttattccatccggaccgcatccgccagtcgcaggagtgcccgcgactgagccgcctcccaccactccactcctccagccaccacccacaatcacaagaagattcccacccctgcctcccatgcctggtcccaagacagtgagacagtctggaaagtgatgtcagaatagttccaataaagcagcctcattctgaggcctgagtgatccanaaaa

SEQ ID NO: 433 - DNA, 555 bp, Homo sapiens
  misc_feature: Incyte ID No: 064703.1
ctcttacttactggttcctttctatcttgtttctatttttttctaaatctatattttgaaacacctttaagtacatccaaattagacaaaattattttttgtcaataaagaacacatttgtatgcctttcttataatttttctcatcaataatacattatttttgatatattttatatacattaattagaattgttattataaattaatttctatttttaactagaaatttaactcttagtaaccttaaatttaacaagtaatttgaactgtcacttattagtatttaatagatgagaaccagcttatttattaaagatttacttaagtcactgagctaaaagacacttgggttaattagtatataatttgtatgagtactcatttattgaagccaatctgaatagaatttcttaggggatttttggccaactatgccaatacatgtacatatgtataaatgtacctgaacatatatagacatactcaaaagccttatagatttcatttcggaattttaattataaagtagtaatacaaactcactggtttgtga

SEQ ID NO: 434 - DNA, 1064 bp, Homo sapiens
  misc_feature: Incyte ID No: 294837.1
cggggacctcctcctgccatcctggggatgctgtggagaatggagatgcacagggggctttgtcctctcctctgccttttggagaaaatatttcactcaaggcaaacgcagcctgagggcagcacaggggaccccaaggctcactgcgcatttctagtcgcccccaaacgcgtgggttttcctcctgttctcctcgtgggtgcctttgctcattctcatcctcctgttctcatccagtctgcccagtctgaccggctcccagcagcatccgcccaaaagtttctcccatgacagcaggaagcagcctcagacaatacatgatggacaggcctggctgtgttccaatagaaccccgagtcagtcagcccgagcctccctctcagctggatactgttaatgacaggggtacacattcccctcccctttccaatgttttaaaactctaggacagtgattctcaaacactttggtctcaaaacccctaagagcatttgcttatgtggcttttatctgttgatagttgctacctgagaaattaaaactgagaaatctaaaaatagatttattttaggaagtcactaaaaataataagcccattgcatgttaacatgaaatagcatatttttacaaaaaaataaattttctaaaaacaaaacatctaagtgagaagagtggcattgttgtacttgttttgcaaatcttttcagtgtccggtttatgagatgacagcactttggtttgttgccaaccattcacttataaagaaacccttttccaataattagctggggctggtgctagagcaataccagaagttcagcgatgtctgtagatttgtccaaatgtatgtgaagagactgtgtttactcagtttttatgtttgcagttaaatcttcaatttgatgagttattttatcattgcaaagtggcagtgtcagggtttcctttattgacttatccagcaggcattcagctatatcaactctacatatgaagtaaggagttgaattaagcagagtagttaataaaaagcttttttttttcatgttttaaaaatgtgacgt

SEQ ID NO: 435 - DNA, 338 bp, Homo sapiens
  misc_feature: Incyte ID No: 982699.1
aggaagctcccctgagcatggtgtccagggtttttaatgaggtttcattatgtaggcatgattgattaaataattggccatatgactgaacttaatctccagttcttctctcctcctaggaagttaggggaatggggtgggtttgaaatttccaatctctaatcacatgtttgggctttttgatgtgacagccccttccttggaactatgtaaggatcccttagatagttccataataagccttcctaatagagtccactaggaaacaataaataaataagtttaatggctgaaacttcattttcccacttcacaaatattaggatggctactatttg

SEQ ID NO: 436 - DNA, 349 bp, Homo sapiens
  misc_feature: Incyte ID No: 015126.1
aaaaaaaaaagaatgactttaatggattgaaacatgtcatatatgtccaaatctatgagttgacaatacttaaaaaaaaaaaaaaaaaaaaaagaaaaattcatttatcaccatgggaggatattggaaaacccaactcattttgaaaactgtcaaagaaagggaaagaagcatttatcctttttggtacaaaccatactttttggtagccaaatagttgataaattgataccttttatagacatatgtccactaccaaagacagaatcatagaattagtatgccaccatgttgtaatatctaatgaaataatgggccaggtgtagtggctcatccctgtaatcccaac

SEQ ID NO: 437 - DNA, 600 bp, Homo sapiens
  misc_feature: Incyte ID No: 235132.10
gaattcgtcactttttttttttctgtagctagtgtaaagatagttgtcatagaacttttgcttgcattgattggcttccaagatgcagtcaagtttactattttctgtttagtatattactagtttgaaagttctttttggaaacctacttgacttcagtgcttggcagttcatggaaaactaacttaatgttaacttattaatccgggttctgtctgctaaaacttatgtgactttcttgattaacacttcttttgaaacacttttcttctttctctttcagtcttggtctttgtaatgggaaaagaaggggtccatggaggcggattgaataagaaggcatactcaatggcaaaatacttgagagactctgggttctagctgctaggcagactgttaagtattaggggaaaattgctcttaaactttcctagctataagcttaagtcttaattctggaaattttattagcaatgcagggtgatggggtatgaacctgtgtctcctttgtatccctctgttggtggggaaaggtgtctttctttctgccctccccccccagaataattctgttcacttttgttttgtttccttgtgtac

SEQ ID NO: 438 - DNA, 631 bp, Homo sapiens
  misc_feature: Incyte ID No: 1070092.1
  unsure 501: a, t, c, g, or other
gggccttgggcgggtggcttctctgggtcccacggttcctgcccaggctcttcgaaccaggaccagtgcggaacagcaagccattggagagtcctgagcagagaaaggactgacctgcctcatgttttaaatctggctgccgtattggaagtagattggaggaaaaaaaagtggaagccctgggacccaccatcatgaacaatcggggagaagacaagaggccagcaaaggaatgaacacagggacgcatgagacatttggtgccgaagacctgggtcagcgggactcctttggggagaccagtcccccatcctcaccctcactctgtgaagagatccacctacgaccttgggtcctcagaccaaccagcctaaggaacatctcacctattttaaatcgggaatgtcaggcctctgaacccaagctaagccatcatatcccctgtgacctgcatttatacatccagatggcctgaagcaaatgaagatccacaaaagaagnaaaaatagccttaactgatgacattccaccattgtcatctgccctaccctaactgagaagatatattctcccccgcccttaagaaggtactttgtatgcctatcccaaacctataagaactaatgataat

SEQ ID NO: 439 - DNA, 280 bp, Homo sapiens
  misc_feature: Incyte ID No: 272599.1
gaaaaaaaccccacaaccatgttataggaaaagttagtataaatgacatagcataattaatatattcaaaataacttttaaaaagttgtcttgtagcttgaagggatcctaaatatcaaaagcccatcacaaacttacaagccttactgctacgtaaatatccctttgaactagtttctggttctatttaaaaagtcgaaaacagttgaaattaatttacgaataagaacagatacacactttgtggggaggctgaggtggtaggatctcctgagcccag

SEQ ID NO: 440 - DNA, 644 bp, Homo sapiens
  misc_feature: Incyte ID No: 415901.1
  unsure 49, 57: a, t, c, g, or other
ttgttttaacaataacaagcgtggtaagggtggtgtcagtccataagtnagataggnagttgctaggcagatgtcgttgcagaagtatgtgtgtgtgtgtgtgtgttgtgtttaaggttgtggtggcctttgtgcaggttgtaaatttttgtagtcttttgatagttcttgttatcaaccatatgtacatgagaacccttccccttcatggcgtttcctggctccgtgtgccagggttttaatacgagtgactccattttgaatctgacaactttcacatttccccccttttgatcaagatctttttctgaaagtatcaccattcaatcatcctgtagttaggttttgatggcccttggtgctaggatggacctattttggtttttggtctcatcccacattgaggcagggggtaattggcacctaagtgtcagtgtcaacatccttttaggcacatttggagcaacaagggagatttaaagggtgtagtcttcagactaaatctacctggagtccactgttaagttcaattctgtctgttccataggcactgtctatcatctcaaagtgctgggagagcattattctcttaggagttgcatttctatgcaaatttgacaagaaacaggtataaagttcttaaa

SEQ ID NO: 441 - DNA, 439 bp, Homo sapiens
  misc_feature: Incyte ID No: 477387.3
ctgcttatctttcacagatatgctatgactgtctggtactttgatgctgaagaaagggcagaagccaaaaagaaattcaggaatttaactagtatgtgtttgataattttctgtgacttttgatcaagttaatccttgacttttattcaattttatatagttttaaacatgttctgttcaatctgttacggcttagctttatatataatgacatcttgatgggttttatcctgaaaccttggccttagggctcttagaaaaatcagaaacaatgcaaggggcttcccctgagaatgcccactgaatgtatgatggtttatgatagatgggaaatagttaactttttcctattaatgttaaccagtcaattgtaacattaaattttgcccatgatttttggcatattgcaaaggaaatataatggaacccagttatgatg

SEQ ID NO: 442 - DNA, 994 bp, Homo sapiens
  misc_feature: Incyte ID No: 208702.1
gctgaagttgactatatgttgcaggactttctgttgtagcacttaggcctctgcctaaaactcagcagagaagaggccttagctaataggagatagtgcatatgaataagctaatatgtatattctatccatactgggcataatcagtgttgtaggacgtagaacaacagcgcaggactaagagttctgtatcacagcccactcttgggtctcagcttcatctataaaagaagagtgagttagattagagaatttctgatgtctcttctaatcattgtggtaaccccacttgtcaccttgcatagtacctggctcatcacagttctacaatgccagtaatgcagtgactcttctagcaaagtaacttactttgtgacagataactttgataaatgaaaatgtaacagtcatggtgttcaggtactttctctatggttggaaaactatacactaacccctggcctgaaaggaaagagtgctctgaagaccagggatttctggcattggaagcgaatgctattcccacgcagaataaattaggagctgaggtgtactggctggtgacactcagattctagtgtggcagtactagcttcaactctctaaataaatttcaaggctttgtgaaaataacctctcttctcattcaagggtatgtttactggttccattcaacaaatatttactgagcacttcctaactgtaaaaggatagtgtttgcatctagaggactagagacatgcctgcacatccctcaccttcaaaggtgaactctacacaggattcttgtcctagtcattgtggcaaccccatctgacaccttgtgtagtacctagctttatagcaggcattagaaatggattggaacctaaccagagatggtctgtatgctcagtggagttcctggctcttaattgttttaagaaaattcattttttccacacagttttttttttgatacatactatttattatgctgtaaaaagcaacacta

SEQ ID NO: 443 - DNA, 2499 bp, Homo sapiens
  misc_feature: Incyte ID No: 1135039.1
  unsure 145: a, t, c, g, or other
tactgcacccggcctgctttctttttagtgaaaaggatctgtgggagcttttattcccatggctgccttcctcaagtcaacctctttccccggaaatggcatcatctctggactgttgtttctccttcttccttctcctccttcncctcctcctcctcctccaccatgcccggctgatttttgtatttttagtagagacagggtttcactatatgggccaggcagatctcgaactccaaacctcgtgatccacctaccttggcctctgaaagtgctgggataccgtggcctctgaaagtgctgggattacaggcatgagccaccgcgcccggccccgttgtttcccttctaagaaacgcagtggtctctgaagcctgcaggggcaggccagccctgcactgaacgcctgttcttgccaggtggcagaaggttgctgctcatttgagcagtacctgtcacccctcctcccactgctgcggctgttaactcatcttcaggtctcacaccttctgcacataaataagctatttttaaaagttattatttttttactctttcttttctttggagagggtaccaaaggatagctgttctgtttaagtagggacctctcatggcctacaggctttgacatctgagaatcaaactggagaacattccgaagccgttcttataagtgtctccatctctacctgggctgaaatggaatgtgcaaatgtagcccagcctggtccttgggtgttgccagttgattgatgactgggagccaaagtggcatctcctttgacctaaacgggcgatgatgaaataaaactcaacagcctttctctcatcttgcattgtgagatgcgaaatagagcgtgtctctctgcctctcattttaggctgaggccgtccaaagcggccatgccccatgtttccactagatggcgctgacacttcaggcatcaaccctcatggcctctcagccttgcaaaggcagccacttaaagtcggtgtcctgtgtggggcaccaagctgagctgcagacacccagtaggcgcgaggcaaatgcgtcccattttaagaggcttgtatttatgagctctttgcttcctccctcccactatctttaaagaattgctctccatctgcctttggcaaagttcctttgccctttgtcttatttttgtgaaaccctccaaggtatttccagtccatttgcatccaatctggcatctttacggagagcggtctcatatgctattgttgttaacgtggactagtatttatgtgttgagaacactggctgtttgtcaggaaaagtgtgccaaaacaaagagtacggccggccctggaaatgcatcagcaaaacccatttcccccgtgcactcattctgagcttccttccttcatttctgtcattactgctgagaactggactgtgcccagctgacctttcccttccttgccctcatcttgctgccagggtctgcaggtttgccaccgtcccggccccagtctgaaacatgggattatttcagaattggaggtggcagcttcagaaaaaaatccttctcgtgtgttgactgctgagatccaggaactgggaaatcaacccccagtttgtagattgctctctttggaaattctgtggcccaacctcgtggctgttttctggaattccttctatcggggcagacagtgctgtgcctttcttgacttcaggatgttccaaggatgctgctggatctgtgtgtgtgtgtgtgtgtgtgtgtgtgtgtgtgcgtgcgtgcgtgtatgtgcgcctgaccctgatttctgcaacctccagatttctttcttgacccttcaaagtggaacagtccagtgccaaaaattttagagtttgagaaggtcacagaaatcctctagttggtgcctccacagtcttcattttacagaggaactcagggctaatggagttaatgcaactagatcagggttttgggtctgtgttctttctaccgtcagcacctgtgtggtcaattctggacacttcccagagaagtctttgagtagagaatcctactcaaatttcactgtatattttaagcattcctctcctttccctttgcctcccctgttgccttttcttcccctgatttctcctctggtcatctcctctcccttctgcgtgtaagccatgggaaagggatgagggaggacagcttctggttaaacacaggtccctcttccacatcaaatgaacattggcttcctgggacagaaggccttcaaaggagggattgcaaagcaaggcaaagcgttctgtcttcattttccccatccccatgagacaagactgatggaaagggtggtggggcaacactgcttaatggatgccttttcacatcatttcagtttttagccctcatgactgtattttctaatcagagacaataacattttaaataaaacaacgctttccagcacactggcgccggccgcttagcatgcatgtagaggcccaattcgccc

SEQ ID NO: 444 - DNA, 4661 bp, Homo sapiens
  misc_feature: Incyte ID No: 232649.2
  unsure 205, 256: a, t, c, g, or other
gtcttgagttgttaaatcataaatgatttacatatttacatggagggaagagggtagggggtgaaatgaatttgtaaagatctcattgaaagtttggggcaagcagatcccaaaatattttcaaagagcaaggaacagtgagagactacactgcacaatccctgttgctctgaaaggaggtgtaaaatgttaacagtcctctagncccatgtgaccacagtcacatgtggtcccattctgcactccagcctgggtnagagagtgagacactgtcccaaggaaaaaaaaaagtgttggggggtagttcttaagcgttgaagatttcctttttggaaagtatttaaaggtagaaatattaataatttttcctaaaacatctccctaagaagtcactgataattataattagtttaaatttattcttacactacttaagaaaaatttcatttagaaaaggctaccatgagatcttttgactatatggagtagactgcatacagatctctttatttctattatgaatattttagcgattataatcagctattccactgagtattagatttggtcactaagtaactcatgtttttctttagtcaatcattcattccattcactaaaaccatttgttgagagttggctaaactctagattctgtgccaggcactgtacagggtgatggagatcactcataagaaggcctcttgctcttagccagatcatatgtaatactaaatttaaattttttgcattaaaaggctaaaaaatcatttgtttttgttaattatatactggttgatttatagatgtaattagcacatattcataagagacaaatatatacaatgagttactatacatatacaaagtgattttagctgtataaagtgatattgcaaaaaactacagctaatgtttcttgctgggtaattattagcataaatatcaggttcttagaggtctttaagagaatactttagagctaccaaaattagcagcagtgatgtaatatcaccctgaaataccaggagcagaggtgccccagagtgcttcacagctatgatcaggaaacttgacctgccccattgctacagcaacggcataaggactaggaaggtccactagctggggaggtcttggaaccctccgagccagaaagaagcattccagcatgattcctcagatgcaatgaggaaggtttacagaattttcacagggcaacagagatcaagtggtatgaaaaggtaggagttttaagctcaagtctcaaagataacctacctttacattctcagtcagaatttgacccagaaagaggaagtttcttcaggaacagaccgtacgttgatgaagtagaagtcatttcagtaaaaacggagtacagaacttggtcataatatcttgcattttatagatttattaaagattagtttcaagttcacattcgctattcagttgtaaaccgaatggatgggaggggagaaaatacaagctctccacacaggtatgctcctctcttttctgagagagaaggcatgggattttcagcataaattccatgttatgtgagtgctgtttgagttctgaagttcctatcaatatctgttcctgcaagtgatctctgtaagaccaccttacatgctggtcttagttattgttaaaattgcaaggtttcttcacaccctctttgataagaagtgtttagctggcagagctttcccttgacttctgagtctagtgtgggttggcccatgacagtgggaagaaatccaacatgttacatggagaccttgtatgtaaacaaactctgtagcctttgaaagtggaactgctttttacagttaaagggctgctaaatggcttgcagatgagatcttctggctcaccttgatcttcacatgaacccattgtgacctatctggatttcctaggacctgtagtttccatttgggttatattagtgcctcaggaatgtgtcactactggtcaagcaatactcagaaattcaggctgtgaggggttagattagaggaaagtaatttaggtgagctatccagagctttcaacctcagggtttataggaaaaaaaaaacaaaatacaaaaacccttaggacttctcatactctagccctgaccttgcagtctcctctgaggggcctcctaagacccttaaaataatattacaataggactttgagtgtgcatttcacagtggaaatagcctctggctagcattacttccaaatgctagttccagctaaaaacaagtactttttattagtttcttgtctttcaacattctgccatcaaaatatattcattttattaacttaccgattattgggaacctgcaaaaaaaaaaaaaaacacacatgctgtctgcagccactgtttggttatttttgatagtttaagagaattataaatcaagttgttctgtctactagagtcagaaattctgtgctagaatgggacttctaaaattaggtggtcctgtcactttctagagaaagacccaaattcataggtttaagtggcttgtctgacatacacatacagccagttagtaacagaattcagaatagaatagagttcttttttttctgtcagtccgttgttctacttctctttccttttcttcatggttgagcagcttttggcaaaatgtgttccatatagcagtagttccaagagatgttaatagatgtaagaaaaaaagtgtgtgtgtgttgggggtgggggattgcatggtcaattaaaatgaaggaatgctgagtttgtttccttactgtaggacttctaagagttttgaacatgctattacacattgtgaatttataaaaggggacaaacactgtttgaccttagactgcactccccttctttattcctcagagcatctcaaaggactacagggtcctttgagaaacatggcccttgatcaagtttacaactctttgagaagacatccctaatggaaatactgaatggcagatctattactgtggtaccatgtagtgtgtaataaatcttgaagtccagaaagcaagtatatttgctgtttagagctatacttaaggtatagagattcttttccacctgtggtgtgtaaaatcagtattgtgtttaattttgcaggtttttcaaggatcaactaatgtgcaaatacagtggtgatatattgatattacattttaataatgcttttgtatggcactttatagttttcagacaccttttgtaacagccctgtgagacagacaatattatccttattgtacagatgggggggctctggaggctctgaaaagtttttggtgatattcccctaagtttataccacaaaatgatggagccagaatttagttgcagaacttctgactccaagtccagagttctttactagacatctggtttcttactagctttttgctagctttttattttacagtgaaaagtatggaagcaaatcctgataattttggcttattatcaaatatcatttattttttattgcagagacccagcagatgtaactctcattgtagccatcccaaagaaaacccttctttgccctttgcagtgccacttatttaggtaactgaagtgtatttccagtacaatttgattttgaactaagatttgatatagagttgtaattgcttacataactctttgaaaatgtatcatccctgggttctcaggtgaaggaggcaattcaaaagtaaaaaagaatattcgaatacaataaataccctctgttctcacacaaatgctgtttcttagctaacttgctttgacaacctactgatgtaacttctttattaatgtgaaatatttatattttgaaataaaattactagtgttgaatgaatcatgtggtaaacttaatctcctgtgtgttgaaaaacttgatcttttgtgaagccaaagtttcatgaatccatccgatctcttaggccttctgttatgccattatcctccggcaccattgtgtacactgaattcttaggagcatactgtcaaacttcgctaagggaaggtgtgtccaggaagtggacactgggcgccttaaagaggtcaagggccctcagtgcacaggggaaggtggccttgtgataggtaaggaagtggtgagatggttggctgagaagaattggaagaaaaagttggattgaggacctgtcctttttgaatgaagaaaaagaagctgaagcttggctatcttcaataccaaagacagctgtgcagcactggtagattgatgaagctgaagctacaggttgaagcactgtgaagcgcctttcaacggtgcttgggaaagagctttctgatgcctcaggttgatgtacccagctcatcaatctggtgttatggaagaagaaatgatccaggccaaggtgtccgggtggactggccagcctcagattcttttttactctgacaggttctcatctggcagatatggtagttgacaaaacattttttcatgcttctcagtctgttgcttaagtctggaattccttcacgtcgtgcatactgctgacaacctccttttggccttgctcctggagaccttagaataggagtcttcagctccccgcccccatcgtggggctctgtgcgagctcagagttgtgcttacagaactgattcttac

SEQ ID NO: 445 - DNA, 369 bp, Homo sapiens
  misc_feature: Incyte ID No: 340450.1
  unsure 85, 125: a, t, c, g, or other
gactttgtttttcgattgttttgtcccttgagattttatcttagtttgacgtggattttttttcatagaatcattgcccaggtanttttttaatttctaaaaagaaatcattgagattttgatanacattatgtcaaatctgtagatcccttttggtaatattgacttcttaacaatattatatcttccaatctatgaacatgggattggaaaggatattctacttaagggtgtcttccttaatttctttcaccaaaatttgtagtttgcagtgaacaagtcttttgcctctaaggttattcctaagtattgtatccctttgatgctattgtaaataaaattttgttcttaatttccttcttggattgt

SEQ ID NO: 446 - DNA, 380 bp, Homo sapiens
  misc_feature: Incyte ID No: 320660.1
ctatatttcatagatgtggaatttttatcagttttacattgttgtcatcacagtgaatacatatctttcttttattatcatggtttatgtgccctgcatattaaaatgtattctaacatagttcagcagctccgttatattctgtcatgtttatatagcatgcttattttataattttactagctgaacagtttagcttttacatttttatgattataaataagtatattataaaaatctttttttaatctataagaatgagtcttcctctgtctgtatgctgacttttaagggtctcagaaacttttaaaatctctctcaggaccaaaaacctgtttgagttttgtggtttatgcctgtagttccagctactagggagg

SEQ ID NO: 447 - DNA, 3494 bp, Homo sapiens
  misc_feature: Incyte ID No: 467104.21
  unsure 1041: a, t, c, g, or other
gcgtcctgctgctggtgcctgtcatctgccaatccggagcacagtaggtgctggccagaggcaagcccgggctgacagccattcgcttgcctgctgggggaaaggggcctcagatcggaccctctggccaaccgcagcctggagcccacctccagcagcagtcctgcgtctctgccggagtgggagcggtcactgctgggggctgcgcagcacgcttgcgtcttttgcatgccgcgttgccactactctgcctgttctggaaggcctgggaccctcccttggagggggcacaggtgggctttgagtaatgagacctggtacttgcatcatccattcatcaagtcagcacccggggatgccaggttctgttaggggcgaggggacgtacagcagtagaggagacagctgagatccctgctcagggggattgaggggggctggcatcccagccggggagacagatgaaaaccaagtaaatcagcagaaaagataatttcactcatgataggagctgtgaggggttagagccaaatagaaatacagcgtgagccacgtgtgaggttttcagtttaaattttctaatagccacttaacagtcaaaggaaacaggtggcaattaacttttaatcttatttaacccaaatatatgcaaagtattatcacttcaacatgtaatcagctataaacggcatcaatatttttgcagtgtttttgcatgaacgtctttgaaatcctgtgtgtacgatacatgtgcagcaggtctcattttggactggccccgtttcaagggctcaccaactgaatgcagcttccagactggagagtgcatgtctggagcaagtggggacaaggacagatggagcttcaggaaggcctctctgaagaggtagatagtgagctttgacatggaggccagggaggcactcagcacacagccacatgaggaatgctgcctggagcggccactgcaaaggccctgtggcagggacaggcaaggcacattggacggtcaggtagggccagggtgcctggaggggagtnagggcagggacagaggtaggaggtggtgtctgagagtggacagggcgggccacccagggcctcgtggtgcacagtgagcagtttggaactgattctgggagtgacagagccattggaggcttttaaagaggggaatcactaggtcagctgctggctggggaatgggccccgggctgggaggggtggaagcctgggcccagcggggaggccccagtgggtgaggaagtcgatggcttgaacaggatgagtcgctctacggtggtgcctctgataatagctgttattttagtttctgaaaaatgtgctgccctcaagagcttctgaggctaggcctacttgggtgaaaatagctttccagggagccacattgtggggacgtgaggcagcagccccactctttggggccacttggctgtctctaactcatctcacttgccagggctggacaaggagatgaaaaagaaaatgccaaggggtgggcaggcaggagcctgttggcgttggcaggcgctgccagccctgtgtcccagtcaagctctggggcgcccttcctgtccatctgggagtagggggtggagtctgaccatgttggggcggagtgttaatattaggagaggatcctccctgggacagggtccccaggcttgggggcaaggccttctgcctggacccccttcctttcctctctcccaggattcctccaggacaccgtagtgctgtgcacggtttggccccatcggtgtgcctgctccttccagccactgctcccttctgcagaaacttgcctgggattcccagggtgcaggggtgggggctggtcaggggctggtcagggcctggtcagtgtagagcagggagcttttcacttttagcatagatagagtggccagggccccatggctgcacctccctggacataaccaggatgtcctgtcatctgccccccaaacaaaactgggggtctcccctttattttgccaacagaatccaatttttaggtgatgagacaagtgtttgacttgaaaagaccttcctgccctgcctcctggaaggtctggagcccagcccagcgccccggatcccctaggcatgtgaaacggggaatgcagtgtcctccagtggctggctgcagcttggggtgggcacctgggtggtggctggtggtccccctgcaggccactgctgccccctcttgggtcctgttctgagtctcaggcctgagtccctggggaaggccccacacctttgccctgtacctgggtatggggatggccctgaggggctgccttgcttgggagaaggggggaaaacagatatttttatataaataagaaaaagacagcccctctgggcagatgaggcctgctgtagggcagggggcttggtaaactgtgtgtccactggtctgtaacccttcagctgggtccttttgtgcagtgaacagcctggacaactgtccaggtggcccttcagggatatgttcctggacctttcttagcttctcaccgatctttcttccacgccaagtccatgttcctcagtcaaacaagtggcaaagagagtgaggaggaggggaaggaggaggaacctgcttcaccctctggcacctgcgggttttgttccacgtgtcttccttgggaaagacaaggggttcttttacagcctaggggtggtttcccctttctacttctgagtgagaccttctcaagtcacggctctttgggcccacatggctaaggtctagccacctgtgggtgtcctgtgctgcctcagtgggtggtgtgggggcggggctgacctcccccgcgcctggctcagtgcagcagaccctggcccctgtgcccgctctctgccctgagcaggagtttgattttcctaccccgtggtgaagcaagcacaggtgggcggaggtgggcagcggtttccagccccagccactggggccgggaggcctctgttgctcagggcaagggaggcagggggcttagtgggacgaaggctcaccccacactcttatcattagcattatctgtatttttaatttttaagttgagaaattttctacaactgtcaaactagacaaatgacagtatccagttcccctcacccagacgcagccattgctgacagctgtcagtgttgaagatggccagcatctcatgcccttggtttcactcgttccctgggtggccctcgtccccctccccacgtcccgcgccccgcataccctgagcagccatggccaggaacttggcacgtgggtttgttttttctgaatctgcatgtgcgcagccatgagcatgaggtcactttttgaatgtgaccgaagctgcatcctgctgcgtgtattgctgtgtggctggctttcctccctgtcttctgttcaggaatactgttcaggctgaataccgtcctgtgacatgggtttaaaaacacaggccaggcatggtgtc

SEQ ID NO: 448 - DNA, 1451 bp, Homo sapiens
  misc_feature: Incyte ID No: 332382.1
  unsure 1440-1442: a, t, c, g, or other
acctaacaaagcccagaacccacagttaaccaaactagactgactttgttattacccattctttgttagtattggatagggaattaggataatgagccattaggcagttctgaaatggaaagccctgaaatttagtgcaatgtaactttaaaactgaaattatataaagagtagaagtttaatcatgtttaattacaaccaaaagcctgttgcctttttgtacagaaatctccttaatttcaggacatgtagatagcttatagaaacatccttttaaatagtttgtgagctcttcctcttcagtggaattgaggaatacagaatgctttatttcatcatcccctgacaggtgacttaggctttgcacagcagatttatttttctctgcgttttttaaaaattgtttttcttgtatcttttttcttcaaaaatatctatatttgagaatatgtacataacaactttccaaagtctctgtggccaaaacctctccagggataagactgagcaagaatataatacttcaaaaaatgtacagctactgtttaagttttaaacagacaccatcacagtttgtggatgaaatagttttaagccatatactttctgtctttttttccccatattaatattggggggcggataatatcactttgatgtacattgatattaaagtttggtaatgcagcttttactgtctacatggtactgtacattagtttttaagcagaaacacaagaaaaatgggtataatttcaaagtagttcttggcagatggctagagaatactgcaagtgaccctgtatcccgaatacacagatatccctctattacaagtttgggattagccataattctgacatggtgtgttcaggtatgggtatatgttgtcagtctacacttgtggaagcaaatatcttgtttaatcaagatgatgtctagtgtcacctaaataatgcaaaaagtttaattctggatgaattcagctttactcaagatccacatattcaagtatcattccacagatattcacagaacacagaaatatctgtgttctgccttatgcctgtggctaagggatgcaaagtagaattgctttacattgactatatatgtgacatgtacgttgctgttttttttaaaataactttatcatgatattcaggtagatcctgggttctagaatatttaaaacaaaaggataaaatgataaaccaaagagtcaacttgttaacttttcttttttaagagatgggttttcactagtatgcccagtctggactccaagtcctgggatcaaacgatcctccagcctcaggttcctgagtagctcaacattttatgtatgtacgatattataaagaaatattcttccaaatgaacttttgtttttagatcaataaatgaataataaataattttgtacaaacatcaaaaaannnaaaaagggg

SEQ ID NO: 449 - DNA, 473 bp, Homo sapiens
  misc_feature: Incyte ID No: 2104530CB1
gggtgaaaggtcatagtcctgtttggcggccatttctcttgaaactgcggctcgggacctgcggtacctgctgtagtcacgagggacgggcggcggcctggtcggcagagagtagcctgcaacattcggccgtggttacgatgagtttacccctcaatcccaaacctttcctcaatggactaacaggaaagccagtgatggtgaaacttaagtggggaatggagtacaagggctatctggtatctgtagatggctacatgaacatgcagcttgcaaatacagaagaatacatagatggagctttgtctggacatctgggtgaagttttaataaggtgtaataatgtcctttatatcagaggtgtggaagaagaggaagaagatggggaaatgagagaatagcatcttttgtgggggattttttttatatatatttctagacaataaagatttgtttgtttttcaacttgaaaa

SEQ ID NO: 450 - DNA, 1422 bp, Homo sapiens
  misc_feature: Incyte ID No: 007228.1
  unsure 771, 799: a, t, c, g, or other
gtgaataagccctaggcagaataaagcattaaaatttcttttggggagagactgtctagtaatttaaaatgtgttaaatatgaaccatattctcattgtgagaattttaatactaatggaatgtttcaaaggttttattcaaaccacaaattatagaatccacccaagaaaattttcttagcattctggaattctcatctaatggttcactggctctcatctattgtttaactcactagtttataggcctgaccttttaaattcctgggataaattttagaatattaaattcttcatctttaaagggaatttgtaatgtgctattcaaacttgtttccttgatgagccctgaaatactgttgacattaactttcataaatgaagcataacacttactagtttagagaaatggtagatgaaatgctctttacattcaattttctgtgtgtggtgctaatttccattgtgactttggaatttagggaagtgagtagctgatcaacaccttaaaattcatttaatacttatttaaaaagaagatgagagattcaaaaatatcagaaaagttggccatggtaaataattttcagaattcttttttaaaattttaattagatttccttttcctagtaagagttgatgtctgctagtggtatttttcattaaatgtcatattcttacaacagtgacattggaatcatttccataggaggtaatttccatagcaactaatcatagtgacccaaacaggattataaagtcaagtgaggnataaatagcagaaaaataccttaaaggnacaaaaaatccattttttataataatgctttttgtaaacaagagcagaacagttttaaaaatctaattagaatttccaaataaaacagtttccataaggtgtcagcaacagcactaaaaatctcaaatcacactgaaccctaaatgtcattgcaagaaataaaaatttaagaattaaattgctgccctgtgtataatctcttgagatctttttaaagctagcaagacctctatttggatcagaactacattattacaaaacaaaatgaacacttgaccaaaaaaccacattaatttaaatggagcctttcattattttcagatagcggggtcctttccatttatagagaatgatgtaactgccaggacacttttgtgtttgcccaggactcctagtaagaattgaatcttgagggagtaatgataacaaaaggtttcttgtgactggtaacatcaggacagacagagtttttggtgagaagaaaatactatatgcctgcttgatagcatgtagagatcatcacatgtatggaaaccttaaaaagtaaacttattttttctaactagaaggctctcataagtttctgttatgattgccatttcaataaatgacattaaaaatct

SEQ ID NO: 451 - DNA, 805 bp, Homo sapiens
  misc_feature: Incyte ID No: 008098.1
gagacgctgagcccagggccagagcttgcggggcgcacagagcccccaggcctcatggcgcagaaacctctcagcaccgcggcggctgaacgcatgaaccttgtgggtcaggatgagatctggaaataccgtctgaaggctgaatcggaagcacggcagaactggccccagaactgggggtgttttaacaaccccttttgaggagttgatcaagtgtgaagaagatctccccaccccaaagcccaaaatcgagcttcctgagcgtttccgcatccggccggtgaccccagtggagaagtacatcaaggtctttccatcccccccagtcccacagaccacccagggcttcatcggctggagatctgcagtgccaggccttgaacaagtgcctagagctcgacgatgcgatcagaagctgcaaaaggtgctttttgcaacgagagctgtgctggcccaagcaagggcgtgcactgaatccagacggagttctgcccaggggtgctgcatatcggtcaccaggcacccagggccatgccagggaaaggaagagctcccctgaatcccgaggacacagtcccctgcgtacttgctcatgggatgttgcaaagaaccacaaagtgtgccttagacattcctcaagtcgatcagcgtcaccctttccagaatgttcacgtcccacacccattcttggctaatgtaatgaataaggcttctctcatttgtttttgataccttgggaatttctatgcagggctttaaaaaaaaataagtgattcaattttaaaaatatttgtctaggtccttc

SEQ ID NO: 452 - DNA, 391 bp, Homo sapiens
  misc_feature: Incyte ID No: 016124.2
  unsure 379, 385-386: a, t, c, g, or other
agcaacagcaggcatggaccaaagcagtgaaggatgtatgaaaaagattagcagtgtgaatcttgacaaacttataaatgacttctcacagatagaaaagaaaatggtagaaaccaatggaaagaacaatatactggatattcagttggaaaaaagtaattgcctattaaaagtaatgcaagcaaaggaggtctccattaaagaagaatgtgctactcttcataatataataaaagggctacaacagaccattgaatatcaacagaatttgaaaggtgaaaatgaacaactaaaaataagtgctgatcttataaaagagaagttaaagtctcatgaacaggatataagaataatattgccaaacttgtaagtgaaatgnaaatcnnagagg

SEQ ID NO: 453 - DNA, 353 bp, Homo sapiens
  misc_feature: Incyte ID No: 016149.1
gctcgagggcttggtaagcatcagaacaaaaaatttcttctccactttctaggagttcttagatcattattttgctggtacagtaactggctctcctaatccactgtgaagcttgcttatttactgtgcggatggtttggaccatcaaaagtgtagagttaaaataaccaggggagagaatattagacccagaatcaaagtagcctaaagttacctctttaggtaccttgtttctcccatgtgcaaactgtaagctcaagtgtcttttctcaggtggtcacaatgtagtttgagactagagggattgtggatgaagatgctctgagttatttagaagagatgcactacatcag

SEQ ID NO: 454 - DNA, 1364 bp, Homo sapiens
  misc_feature: Incyte ID No: 025731.1
  unsure 1260: a, t, c, g, or other
tctatgaaaatagaagtggggcaattttgtgcttaattccatggtccagatacatcaaaaaatcaatgtgggctgtcaaagaaggtttcttgatagtcatgagtcagcctgattcttgaaaggatatgtggaatataaaattttatttatattccttttgagaaaatactgagaaaaccatcttccctggaaaagagaacgtattgtaaagaaagtacatgaaattgaaggttgaatatccaacatcccccacactgccccagtgtctctgctcccttactgagccttactattattcttcatagccctatcactacctagtctagtattcactgaactgtgtcatccactagaatatgagcataatgagagcagagactacacctgtcggttcagtattctatcctcagcacatagaatggtacctggcacatagcagatgctaaaataaaatttaaatgaataaattaattcaatcaacaccttcaaggtgttattattacctacaactattgtttacaagaggtatgcaccgtggaagatcctggagacacaacaatgaataaagccaagccagttcctgcccccgtggagcttgtagtcaagacattgaacaagtgatcagaaagatgttgactgctgcagcagagggttgcaagctgctcatgagtatataacaagtagccctaaccaaagcattctctcccttggtttaatgtccacccattgaggtgactgctaaatactaatccatgactctatcccttggcattcaaactcacacatccacttacctgcctctccaacctcatctccctccactcacaagagcccatcatattattcatcaaaatgaaactgcacccagttcttctgaacatattactttacaaaactttcatttatgcctggtgactctcatcaggcattcaaaagctttccctcagtgcttcagggctcttccttttcttccctttatacatacacctttatgtatcttcatacgtaccctgcataacctcatatatcttagcatttaccatattctgttgaaaaactgtttccatttctctttacttactagaatgtaaacagatgcacaatgttgagaaaatgaaaagtgacaactttgtttacaagtttagaaattatcagattctcacttaagctctagtctctgtaaagtccacaactactcaataaaagtgaagaaaaatgttaacagagagggaggaatcaaaaacaaagaactatttaaanaaaaaaaaaagcaagtccttgaaacttggagctaatgactgtattagacaagggataagagccaagaagagttgaaaccaagaagggaccaagtagtggctctt

SEQ ID NO: 455 - DNA, 711 bp, Homo sapiens
  misc_feature: Incyte ID No: 026856.1
  unsure 477, 524, 535, 539, 557, 559: a, t, c, g, or other
aggatctagcaagctggggagatcatgtcactgggttacccccggagcagtggtgaggcttgggtgtcagagccatcccatccacaagtggtgccagaaggcaccaacaagacccagaagctccccaggaactcacctccgactgccagtgagggtcctgtctgtgacaaagaaatgtgccatcgggggaagataagcgtccactgcagcacagaggaaacacgagagctgcagggcacgggctcagtgagccgaggaagtcagtggcagtggccgcctggccagggttcctggagctcccaggaagctgccctccaaagcagtctgctcctctgtgccacagtgcagaggaaaggtgtctgggggccagaagctgatggccgtattgactggatgacaaacagggaccacacgagcctcctgttggcaaaagagaacatgtgtgatgaggctgtataatggacagcagaaggcctnggctagggctctaacgttacccctaattgctgtgtgttcttggccangctatagtacntctntgggtctagttatcaaantncatgttgtttaaaaaattatactaggtttagcagcattcattggttgggaagaatactgtataaggatccactctagatgtcatggtttgcagtacaagctgcaattgtacagataaagtttgggagtgtgtacagtatactagcttgatgc

SEQ ID NO: 456 - DNA, 982 bp, Homo sapiens
  misc_feature: Incyte ID No: 028918.1
cagttttatgctttaaaacaaatgataaagttaatttccaattcaatagtgaaatattaacaatctaactatagccagatcaaagacacctgaacacagaaaacctttatttgctggtgctgccattgcacaggctgtacaatgaaatagatttgaaaagctgattgattttcctgcacataaattctggatgtcaatttccaaccaaactccaatccagctatgtggcatgaagagttacaggagggagggaggaaaatagccctatattagtcatgtttgcatacagaggatcaaagtaggccttcaccataatagttctaattaaaatggtcctcgctgtaggagagacaaaggggcttttcctctagctggtaactattcagatgatggacaagtcttctttcataaaagattacaaagaaggcatccgaatcactgtctgtgatactgggtcacatattaatcactgcagctaattgtaaatctttctatgaaacactgaaaagcctctttgtgaattaatacagttctgcttgatgcacttgatttgaaaagacatttctctgtatgtggcgcatgtcggctttgctttgaaaaataacaaagttagcagaatatgttcaatatattttcttggggaatagggtttttattacatgattcattaaggatttgccttaccctgacatttgtgatataaaggaaaatcagaaaaaaagtaattttcttgatcaagatatgtttttacttaatgcaaataaatgtagtctgttgcttgcaaggaaaaaaaaatggcttctgatatctggtataaactgctaaataggataatacgtgcctcttttgttaaaccggcatttaaatgctggactgcttctaaatctgtttgtttcttttcatctgtgccatacactaaaaaacaactgttgccttcatactatatttgttagagcagaatacaaataaaattcgagaggat

SEQ ID NO: 457 - DNA, 1619 bp, Homo sapiens
  misc_feature: Incyte ID No: 032481.1
  unsure 83-106: a, t, c, g, or other
ttaatctacatatcttatgtatataaatattgcctaatccatagaaaaaaggatataaagtattaaatatgtgatatatagcnnnnnnnnnnnnnnnnnnnnnnnnatagggaagttcaagtcacttcaattgaagaaacatatctctgagcataggagcagcctcaggtcctatggtgggatgcagtggacaggagagggggaaattagaaaagagaactatataattgaaaaagggatataaagcattaaatatatgatatatagctatatctatgtatgtatctaacagagaagttcaagtcacttcaattaaagaaacatttttgagcatgggaccagcctcaggtcttatgctgggatgcagtagacaggagatggggaaattagaaaagagaactgtgtaattgaaatgacgtgggctgcacccttaaggaacttataattaatgatgatctgaataaacataccaggataaagatgtcaaatgagtgtgactcccttaaagtagattaaagtgtgcattctttgtttcctaaaatatgattttactgcttgaaattacatttgagttgaagtttagaaactaacatagcattaatatgaataatgcatggaaaattattatcctttgaaaactgattgataaatatattccccctcctttagaaacagtcaaaagccacttcaaacaagtttcaaaataaaggaaggtagcaagttaggcgatggattatattttcttggcttgttgtatacccattggccagggcctttataaggactcccaaaagcattttgaagaatggcaatatcaaataagtgtatgtcctctcaaatgaggcatttttaattgttacaatctatttggacgctcaggttatgatatgtttatgaaaaataagcttcattatttcttatagctacatcctattattcccttttagaaacaagaataacaataagttttaatagttgccatacttagcatttatcaggtctaatgaaaccaatattgaatctctgataaatattttctgatgttactagctatgggaaattagaactggcacaaccctgacattactaagtggaaatgttaggatttttcggcatcgcatgttagaatctctaaaatttaaacattcctgttaaatgactaaggtttgcttttatcaatatgaattctgaaggccaatatcataccattaactatgaaagcttttaattcctaaaaatagttttagagatattcaagcaatgctctcctaatatccatacgcaagtgtgtttatgacacaaattcactagtctggtttaaaaatgaaatctttatattgactgggtgtcccacatattccagtaatttctgttatgagaggacttgaaatagcaaattgcccacacagttaactggatagatcacgtacgtggtgatcataaccacttggtactacacccagaaactcaaaattgtcttttctcctgatgagatatggggtgtccttttgtacgtctagggcctagggtacccaagtgaagtgaatatataagcaaaatgtgtttgtatccagagtcttcctgtcattgtaataaaaaatttatttaaaaatttaaaa

SEQ ID NO: 458 - DNA, 462 bp, Homo sapiens
  misc_feature: Incyte ID No: 045630.1
cccaaatatagtaaagcctgcttttctgttgaagtctgtgaatatagagaaaacataaaaaggtgacacatgagtaaaattataaatattttatactttgtgggatgctagtgggaaaagcagactagggagtgaaatttgatacgtctaagctactcaaagataagtctgagaagcatgaaaacagtctttgttgcaatattgtaacattataaggaaaaacatcttggattgcagagaaatagaaagatgcagagaagtgggaaaaaaaagtagtgaagaagtagagggagagaagtgagctttcaataggactgaattgagtgtaaaccacttttgatccatttgaatcatgaacttcagaatatataattatcttcctttaaaggctgatgctacttcacaggtttttactgctgtaaggtgccattccaatgagaagtagacccagtagtcaaatag

SEQ ID NO: 459 - DNA, 750 bp, Homo sapiens
  misc_feature: Incyte ID No: 047533.1
tggttcttctgggtataagtcatgagggattcaacctgcacctggaaagaaggtatcaagctagggatggggagaaattacccagggcaatccagtgctggggattacacaatgaaaagtcccttagacagcagtgtggtggatacttccaccaacattcattcagtaaatatcttctggtgacctggtatggatcttttaattctgaggcaatcacagagatggcaggtcaccagtagtttctaactgaaggtggtagtaactggcaatgcattgctttaggactgtaggcattacagctatttttttcaatatgaactttataatgtagaactaagaccccagaaaaacctcatagatataaaattttcctctctagctattgatgtcattttagttacttatttatttttgtttggtttgatttggttatgggttagcaatctgaaagcagttaccattactaattctaaaaatggattcaaaataggaacacttccaaattagaagcatttttttaaaaggagtctgaattcaaaagtctgactttatctttatcaaatgcttttggcaatgttgaagaaatcttctgggagaaatgtaataaacatttcttggagggacagcatagagtgcaaacatctcaaacgtgattcacttgcattttctgaacaatgcttttgcctactctgagctgttggttccagtatttggagtccccatgacagaaatccaaaaccacttctagat

SEQ ID NO: 460 - DNA, 691 bp, Homo sapiens
  misc_feature: Incyte ID No: 072540.1
atggatggcggcggcgactgctgcagctgggccagctgcgcgggctgcaccccctcccagcctgcgagaggaggaagctagtagaagatttgtaccaacaaaaccaaggagtaaacaacttgagaataactgcatgagctcagggcttggactgtcagattccatttctaagcttccagaagagcggcacatagacactggggaagtcagagcctttgaactccaatgccatccccgtcacccacctccaccaccagcaccaccaccgaatggcactttggacaatttttccctctcatgtgacttttgtcatttcttacgtcagttggagccagcacctctcaaatccatcttctaaaacccagaaaattgtgtgtaacacatgatgactgaaagggagtaggctgaccagttaagagcctgccactggaatggaaggctgtgggaaggtgaggggacggtggacatcaaccgggaagagctgaaagatggcgttaccaggtatctaccctgctaccctgcatagaattcccaagacccagggtgggtttttatgcttccccgtttaatatttatttttattatttgtcagtagaagtgtctttatcttaaaaaattaatacattattgttgtcaccaatttaaataatatggagatgaatagaaagttaaaagtatagtttacactacc

SEQ ID NO: 461 - DNA, 562 bp, Homo sapiens
  misc_feature: Incyte ID No: 076580.1
atcccaatttaaattcaacttagtaaatatatattattacatcgtgaccactgatacctttattcagtgaaagcaataatcttagtggtatctctccaagagtgaagtttgaagttaaaatactatctttcactttttaaaaatgctatttttaactcctataaagggtgtttatggctatatatgaatacattatattgtggattttctgcaacagagaggaattagattcacaggctgaaagcctcatggaatttttgagctacaaggaatcttagggaaaatcaactccaacccctttgtttttcaaatgaagaaaccagactccaaagaagcaaaattaacagacccagtgcatcacttctggcaactctgatgcctgatcctgatcttccaggatgctggatgatgcgagatctcagccactgagatctaaaatatgtttaaagcatgtgaaacagtagtggaggttaacgaaagctcttcctgctgtaaatatttacatgtaagctattttacttatttgagtgttcttaggtacagtttccccataatagaaaga

SEQ ID NO: 462 - DNA, 334 bp, Homo sapiens
  misc_feature: Incyte ID No: 1072776.1
  unsure 62, 331: a, t, c, g, or other
gggcaaattatcgcccttggtgaactgccacttgcaacctctggtctactcatttcttcctntatatgcatataaacctgtgtggctttaataggacattagtaacaggtcacctaagcctttcttcggtgcttctagaattaaggtacagaatctttacatatcacaatctccttagccactattctgtccagatccttaaatgccatccttgccaggcattgggtgtataagtaaacaaaaaattgaggtgactaggtggtggcaatcccgttctaagtaacctagaaatattcattctcagcagccttgaagcaaagcttcctcagcnata

SEQ ID NO: 463 - DNA, 279 bp, Homo sapiens
  misc_feature: Incyte ID No: 1100233.1
aaacgctcctccagagggcttccagaagaaacagtggctcctggggatccttgaggtggattagcaagaggctgcctggctgaccccagctctcagaagggctctcagggtgacctgctacgactattgggaggacaaatcctggaagtggaaatgccaggccaaattacctgctcactgaggctccaaaggaatgaccatgaggctccaactctcacagcctcctgcaagccatcctgcttcaagtcctcactgtgctgatggctgcctgtgtacgag

SEQ ID NO: 464 - DNA, 4836 bp, Homo sapiens
  misc_feature: Incyte ID No: 1102220.2
  unsure 3246-3421, 4572: a, t, c, g, or other
taattagtgctatattctggatagttcctttttagtactgttttatgaagctttatcaacttggcttcatgatcctcactttgacttgattttaagaggatggataacacagttatctctgtaatgttctgtcccagtatgtctttgggtcaccagttaccttcttaaaatatgtgctttaggtaggtgttattacatatctgtagacaattggtatatgaaatatacacatcctgtgccccaatatggtgcattatgaaaaacaaaatcattttctaaaatgcattttttgagcattgctctatagaagggaagggtgatgagagaacagaactggcccctgtacaggtgtcattaatctggttgtatatgggttataatatgtaatacaaaaagctcattaagtatgggactacatggagagggaagacagtttcatttatagctactggggctaccaggacccttgctgactgcagcctggttgtgattagttcaggttactaggtgttctgatggagtgggacagtccaagtccagtaactgacattacgttttatgcgtgtgcagtttggtataacgtggagtcagtgctctaacgacacactatacttctatatgcttttttctgtgaattttccttggtacatgagagaaataagtactctcatcaacttatgataaattggactattaggaataaaacaatctcagagcagctcctaaacaagagaataaaaatgggccatcccagcacttataaggggagcacatcttgtaatgaaagtctgtgcctattgttaatgattaccaatgcaaactgcagaaatcagttgacattgtcccacaaggaaaaagtgatgccagtaaagtgggggaagagatggtaaataattctagaatgagcaaaagtgcttaattagtacagtatactcaaggtcttgcataacccacactccacgaaaaccgcatcgtaaacagagagtgaacagcacctctccattgctacatctccagaatattgttcggttatgttcatgtggttatggagcaataagaatatataccattaatttttaggtctttcaaattgttcaccaagttttgtgtttgatatttatgaagtgatctttaacacatctgcattgttaatttaagcatgcacagaaatttgggtaatgtttgagtagattgccaagcgctactgtgattcatgaatgaatttctcatagtcttctgcctgcagttttatagtttgaggggcacccatatttgtgggttagagttagtaagaatatgaatccagttatcaaagtattcatccctgaggttttgagttttattgtggtggtgattttctcatgagaaggtagacaacacttcagtttttcttgagggggaaaaaatgtacccgctaaccttttttcacccatgatttgagccctaaaacaacagcctttatgttttcagtgcaggatttcttggaatttcttgcttgtatcaatcctgatgatagccatcctgaacagatgcttctggtctgttttcctggaatagcagacatccttttgaacactaatgatgccaggaagagagtaaggctagaggaggagactgtcattttaaccccagtccagtggcttgtccgacaacaggccatttccctttacattcctccacagacagaaatggctattaaaaatgttttaacctcatgtatgaactgaatttaaaaaaccactaaagtgatactttatacttctgttttactccctagtgggttttctttaatttggatttttgttgggatgtagcttttcctagactgtatttctgtagctctttttctctggtgtattcatggaaagcatctactgccgcacgacactagtactgtgccttctttcactgccctctgctctgcagctctcacccagcttggctgcttcaagtctgtgcagttgacttggctgtactgaaaagtgaacagcatggattaactcatcctgctgctgagggcagtgcaaacaggtgcttattagaggtagtgacttgcttaattagtgacactcttaatttctactatggataatttcaaagtagaatcactctatgcttagagttttggcaccaatgctgtagggcagcagaatctattctcagtaaaataacttatggtttattagatattctgtattggattttaccagcttgacttttactgctcagatgctttctttcccccccttagacgctgtaattctcttgggaagagtaactattcttaaggtttttacagatacccaccttagttgtaaattggatagtttatatttctgggactttttaaatgaaaatgtggaatgttaagttacaaaagacttttcatcagaaaatttcaaacaaagtaaacatggcgttttatagtcctctaaaatctaggtgctcccacccaccaaaggcatatcctgcaaagggctgtgaactatcttggtgaactgtcttgggtcccctttccatgtatgttttcttgtcactgaaaacaaacaacgctgagtttatcaagaaaatttaaattgggggatcataataattccaaccaagtgacaactctgacatcaaggttattaggagctgtacatccaattcaagttttatttgctgctattctgggagaataaacttgtatatggagaataaactaataaacttgtatcgaggaaatccataaagttataaattagcctgaaaaatatttcaggtaatggtgtggattggcctgctttgactctcagccaccaacagaaatctttgtcacctttgttcctcagctaaaagtaattttgttataaacacaaagtgactttaaacaggtaaaaaacccattcctatttttgtacattaccaaaagtttttcatatacctacagagctaactaattacaactgatttaatccactcaagtttagaccagttaaacccataggatcctgtatggttatcaatgtgatgccttgcttttcataaaataggtataattgggtcatacacttgacgagagggtgactgtttctaggggaagaaaaccctttagattgcaggtaactttcacttttttttttttaatatacactttacatttgtataaattatgcagggtactcctaaccctgtagaaatgtatgacctctcacaaagttgagatttgatccaaagagaaatgcaagtataaaagaattagatacnnnnnnnnnnnnnnnnnnnnnnnnnnnnnnnnnnnnnnnnnnnnnnnnnnnnnnnnnnnnnnnnnnnnnnnnnnnnnnnnnnnnnnnnnnnnnnnnnnnnnnnnnnnnnnnnnnnnnnnnnnnnnnnnnnnnnnnnnnnnnnnnnnnnnnnnnnnnnnnnnnnnnnnnnnnnnnnnatttctacacctttatccctcaaataaaacaagtgctcagttcttaccgtgcccttgcaaggtctatatgtaaaagaaatctgaaatttagctgtagaataaaacttgataaataaaaagaaaaaacatacatttctccagttggtttgctctttgcttgttgaagtaataaaccgttttaaagagaaaatacttgctgtaaacccccagtgccttcaactcttttggcagaatatttttaaagaaatccagcaagcaaactttgaggtgctaatgaaagtaaaggaaggtggtatttctagttttggcagaaatgaaaagtgtctcacaagagacatcactacccacgtggggtctggctgctttctaccaaagacatttagagaagtgaattgagtcagggtgatggtgaacactacatattttatagatggttaagttgagaattaattatgtttatcatggatggctactaataccaagctcatgattgttgcagcctcaacgtcttaggcagtaaaacttgtctgcagcactaaagggggagaaacccttatattttgcaaactgtccattcgttaaatttattgtaacctaataccaaaaactgccgtttttcatattatttccccacctcctacttttcttttttttttttgctacttgtaaaataaccccttctagaaaataagcattaactggaatgtttcaaacaattttgcttcattttactatcagccactagtgaactcttacagagatgtacatttaagataaaattagcttgtgctaagtgttttaaaaacattgtttactgttaaaggggaattgcacattatatttaactgggattgctccctccctcagttctttaaaaaacaagagtcaaggctcacaccaacttgtaggctgtgggagctttgccataggtagatacaatgtagaagtatacttttttaaagcatgaagaagacaaggaacttcattataatgtaccaggtagaggacattattattcaaaggattatgcacagctcagtgaagatgaagttacaatttttctcgcagctttgttgctattattttcttctgcataaatgtatgctcatttcattatgtgccttgctccctgattgtgcaaagctatatanatatatatatatagatagatagcatagatagatatatgagagagatatattcagtactactgaggatgtttttctgaggatgtttttgttctgctggattaagttattttccaagttactcttgccagttatgtcagtaaactattgtaatggcttagcacactagtcgtacagtcagtgtaaatgtttttcatttacatgttttcattatatcagcttatcaaatccttaataaaaaaaattcatagatttcatttaaaaaaa

SEQ ID NO: 465 - DNA, 1910 bp, Homo sapiens
  misc_feature: Incyte ID No: 1328508.1
  unsure 750, 754, 1649-1652: a, t, c, g, or other
aactcttgaatctgaatagttcctgccgtggggagaggtattgttcagggaaaatgtgatcgggattttagtgtggctgtaaacacagtcttcccgaaaggcttactgacgtttgaatgtgcaaatggtatgacgaaagatgtagggctctttcgttgaacttctctacggcgggcgggcggacacgtgttccaggtggacttgcctgccggccaggctttgagtctgaacttcctctaactgcagctgggctcctggcacatgcggtgccctggcatgatggtcctccctggccaggagcgagtcctaaggaaattcattccattgaccggactcctcccatgataggcccatggcttctctgctggccttagttcttggcccttcagattccctggggatataaggcccaagcggatctccctgcagccagccagcagacagcccagggtttccgcccaaagtgccctcatgttgcagtccactttgtgcatggaagatattgaacacaatttccactgctcttcctgcagggcctcctttccagcagtcacttgctcagactgaggggtgcacctcccctgccattgacaggtcctgcgccttcaggatgggctatttcaagcccgttttaagtggctcttacacaggctcagcaacctctgtggcctgcaggatgggccttctgctgtctctttcctttcttaaaaccttaaggtctttctagagacctattcaattttctttttntttntttttttcactacaatgtcatgacaactgcagcaatttgtgttactttccaagatgacaatttgacattaattaagggaaaaaataaaaaggtgagctagatgacttaaaatgcatctcttttttgaaaaagctgtagctggcaagtcaaagtttattttatgtgtgtaaattcccagttgagcatttttttcatttggattagcgtgagaggaaaaatgtgaaatgtctcaaatcaaatgcttccttctaaagattagacattgcccaaccctgcccccgcccccaatcaatcagtgacagaagagaccgccatcagccaactagctttttttaaatggctgatatattcatctctaaaggccctcaaagcactgtaaaacttttaaaactttagcctttatgtcagattagagaaaccaaacaacgtgacggtacatgtgatgaaaagctctgggtttatttttctcccgcttatgaacatgtatttttatttgccgaatgaaaatcgtggtgtgttgctttgatgaatggaatttcaggctctccctgtgcacagccggtgggcaaaggtcaccttaaatgactttttctccctatctgtctgttaatccccagaccggttgcattttccagttgcttcctgggtgtctgtacatagtttgtctttgtataggagtgagtgtggtgaccgtcaatcccctaatctcccaggttctaatttaacagatgatggctgtatgaggaaaacgatgtaaatagagaatacaaattaaactggatctctgtggcctaggttttgtacatacagaaactgcatggtatttaaattattgtttgtctctgatgatgtatgcagtttctttaaaaacaaaccaaaaaaaagtaaaaaaaannnnaaaaaaattcttgactcttgtgtgttttgttatcaaccagcagcagaaaccaccaaaaatgctttgactgggaaagggaggttgcaggaatgggagaggtcagctcatctgcaaaatacatagtgagagtgagtggacatacgggacaaccgcatgtctcctctggtattattgggggaaggaagtattgtagcacatacattaactttctagaagacttttgtgtactaggatttttttcctcaacttttttttttt

SEQ ID NO: 466 - DNA, 1050 bp, Homo sapiens
  misc_feature: Incyte ID No: 1383457.1
  unsure 836: a, t, c, g, or other
tagtagctgtgctctttggggtccaggcgccgcggcgggatgtagctgaaggcggactgcgccgagacgggcggcggcctgggcttgccccgcagcgtggacgcggtggtctcctcctcgtcgtcctccatgccgccaccgtccagcgcccccgccttggccgcggtccgtcccgcccgcccaggggcccagtcggagtctgcaggcctcaggttgctcagcgccagcgtctagcccgcgtctgtgttcggtcgttgcctggaaaccgccgcctggcgacccggagctgccctgcagcattcccgctccagggtggagcgaccctcccctcctccctcccggcccctcgactacacctggggtctctccttccttcctcctcgggaggagcccgactgggagacgccgcggggactacccatttccagcccgctcacctttcccatgcagcagcccctgcttcactcactgatcactccttcgcgagaccattagtgactgagcacctagcgcatggtgtgtcaggagctggagattgagccttgaacggagcaggccttgtccacaggaagcttacagtctggagaagacacatgaaagacgcgaagaagccaaatgacttgccgaggctccagggcagcgctgtccaatagaaacatgatgagagccacgtgtgtcgtttcttatttgactcagaggaactgactgcttccgttttcccagaattctatcaaatatctttcaagtgtccacatgtacccaagcgacgcacattcctcacatagaggaaggcaaggaaaggtaaagaagactgcctgtgttgttcaggcagaacngtcaccacactcttccacagctcctgcctgcctgccatctacacacacactcacaacacacactcagagaggatccactctctcctccagagatcctctagtttcaactgctgcagcccaaagtcctgaactttgctgccccctattgataggcccaaagactatcactgttgctgcaggggttgtgctagcaagtaaaacaattttttttcat

SEQ ID NO: 467 - DNA, 1425 bp, Homo sapiens
  misc_feature: Incyte ID No: 140230.5
  unsure 1302: a, t, c, g, or other
taatggatttaggagctgttttctttaaggggaaaccggtagaaaaaggacgaagaagtgtaagtcccgctgattctcggggtaaggctcggatggcaaggacgcgttctgcctgggcatgtaggggaggtgtttttgccatcaccagtttctcaggctggggagcacagaggggaggaggaggactaaatgaaaagttgttcccagcctgcacatgaacacattcatgacacacaaaactggctggaaggagataagagcactgggtttgagattccctccattaaaacaaccaagacaaagaaaggaggggaaaaaaagataaaaagcaagccagggttccctgccctattgaaactcaaacccagactgccttgggttttatctttcccttacccctggcacctccagagaactgggacctgaaatagtccctccgttctcccctttgaccatgtaataaatgaaccagaagcactgagattaacctatcaacgccctgagaagccttccagcctgcggtgctgtctgctgggaggtcagctggtcaaggcagaggaggagaggaggaaaggatgggggctgaagagcagaagggaggggagacagaggggattaaagaggggaggagagagtgcagagctccaggaaagggtatcagagctgcagccagctctgccctctaccctagggaggccagaaagacacaaacagccctccgggcctttacgctggactctggcttggcaggctccaggcagggtcctctgggaagttactctagaaaacgaagggaggaggagcacaagatcctcagcaacgaacacctgcacttagaaaaagtggacagcttctgccaaccacaccctacccatggtactgtatgctattaactcctggaaacgccccgtaaatgcgagttgtttttgtatttgtgtgttgagatgggccttgtggtttctctgtactcagagcacatttcttgtaattactattgttatttttattgtcatgactgcccctgagctctggtgagaaaagctgaatttacaaggaaagggatgaagttaatatttgcatcacataattatatcattactgtgtatctgtgtattgtactaaatggactgatgctgcgcacatgagctgaaaatgaagagccctcccatccattctatgagaaagaaggtcaccctgagtgacttctgtttcatgatttcccaaacaggttttagagctggaaaaggacttaaagaaagagactgggtggtgctttctagaaaggaggaagatgggtatcangggaaggaaggagttagagggctttgtacaaagccgagattgctcattaaatgaggaacatcctggcctgtgggcttgtaagactgaccttcttgggacttcaggaggatcttgaactaaaag

SEQ ID NO: 468 - DNA, 1270 bp, Homo sapiens
  misc_feature: Incyte ID No: 150868.1
gaaaattctgcagtggtttgaaaaccagaagcagcttaatttttacgcaagttcattactctttgtttatgaaggttcatctcagccaaccactacaaaattgaatgacagaactttggcagaaaagtttttgtccaaaggacaactgtcagacacagaagtactagagtacaataataactttcatgtgttaagttccacagctaatggaaaaatagagtcttcagtgggcaaaagcttgtccaagatgtatgcgcgtcacaggaaaatatatacaaaaaagcatcacagtcagacttcattgaaagttgaaaatctggagcaagacaatgggtggaaaagcatgtcacaggaacatttaaatggaaatgtactttcccaactggaaaaagttttctaccatcttcccactggttgccaagagattgctgaagtagaagtgcgaatgatagattttgctcatgtgttccctagcaacacaatagatgagggatatgtttatgggctaaagcatttaatttctgtacttcgaagtattttagacaattgaatcctctgttgcagtctttttaagaggtgggccaatcataatgaagaggagcaggcaatatctccgcacctttaatgctatgcaaaaaatttgtattatgagtcgacattttatttgtctttatacttttggaagaaaggttaacttttttataatcttactcaggaaaactaactatttgttcattagaaaactatgaagaataaagaaacttaggaatgttaagcagggaatgtagtggtacatggcttaaacatcttttttggctcaagcaaaatgcaaaccattattcagtcattaagagtttagttagctttctgtaaccaattcatgaaatctctgtccacccaatttgacaatgagccatatctaaaataatacattattagaacacctaccaaaatctcaaaagcacaggttgatgtccttagtcttgctatgtatgaagttattaaaactggagaaaattctacttcagaaataagtactgcttaggttttatattaaaaattcagaccagcatatcaaaggatgcttcttagtgaaatgatttagaattgttgcattccaaaagcaggttttctctttaatttttacaactctctctctctctcaaaatattatacttcatgaaaaagacaattgacatggatgacaacaagagtcttgaaattaagggcacactcattgttcttaccagggttagaagagagaagttat

SEQ ID NO: 469 - DNA, 841 bp, Homo sapiens
  misc_feature: Incyte ID No: 172582.1
  unsure 619: a, t, c, g, or other
ccttaacaccatctccttataggcctactccaggagcagggcataacaagtcaggagcaggcccagtagacacatgttaggaacaggatcggggtggtggtggtgggtgataagcaatggtcaggtcacagttaccataacccattgacttgggggttttgcagggtctgaagtgccatcatacccacttctttccatctgggaccagtaaaaaaaataccatatgcgtctttaatgcaatagagttttttcttttctttttcatttatgaagaacgctttttaaaacctctcaaatgtttccttgggttgaaatcaaatttataatagcctgtatatcatcccctagagatagcaaaaccaactcatgagggagcctgtgtttatgagggaagagggggtacacttaggttttcgtacatatgggtatgagatggaacacactggaaacatgaaaactgcaggcttagatgagaagcgggtgtatatgttgtgagctttaccatctgaggcagagtcccagcctggccagattagctgtttgcctagagcatctttctaggggttggtgttctgtatgttgaaatgaatgaaattgcttccccagggctggaacacantctgtttgggtggtgttctaggtgtatacttgcacccatttattattaaaggggtggtttgagtttgtactggatttgatgagagtttttctttttcagtactcgtgatgcatttcttcacctgaaagtataatgcattttgatttctatggcaaccagtgaacgccaagggaacaaattctatttctgttttctaacgtaacaggattagtggaggctcag

SEQ ID NO: 470 - DNA, 2058 bp, Homo sapiens
  misc_feature: Incyte ID No: 175536.1
taggagttagctgtcagctcttgataatataattggggaaacagaatagatattttatgatatgataattctgatgatctaaagataatgtcttagacaattacctttacatttcaagctctgggatataaattacgtagtcagcattaagatagtattatttttaattgctactaagtggtaacttttgtattttaatatcttgcaagggcaaagaaggcatttttaaaattctaaatgcacacctcctaaggtaaatagtctttcaaaaatatcaggcgtgccaactcttgctgagttttgttaaatcctccttaactgtctgcagtgccccctgacttcttttaaatggatgtgaatatatgtggaaaactaaatccatttattataaatgccttatctttaccctttgggatcttactaaatgcattttacctgctactatttattaaaaatggaagctgtcttgaattagagatacctcacgtaaggtaggttaagcagtcaagtatttctttaggcttatgttcagcacctcagccccctactgagaagttaattaattcagtccaaaatgaaattatagggcagtttggtgcaatttatgttaaatgccatttgaatgtaatcacctgtgttaccacgaatgaggcacaactatactacatggacagagtactgcattgcaccatgagcaagaactgctctgcaagaaaaatatctgtccctgtggtctgaatttatcaaaactcattttcttgttaaagagtgaattattgaatagtaattaaactttaactgatgaccatttatattctagtagccatcttcactgttagtcttaaattataatgtaaagttgacattttccccttacatttcaaaggcatcactatttttaaatgtttacatatgtttacatgtttgtgtgcaactgcttcattgctattaatagttaaatgaaatctgcatattctggatcatagatgttcttagttaactctgggaaagatgttacctttgggtttttaaaagacaagtcatcatttgaaaatatattagggtgtgttgattttctgacatgcttgtgtaattggctttgtttataatttttattttttaatatgggtcagacttttggattaaaaagtattatatcatggacatacattttttaaagtaccaaaggtatttggtaagcgagcccaagtcatgtaattgaaacttctgtacattaaaagaactgattcatgaagacgttttctaactttttctctttaagtgctcctctagactagactgattgaagtagacagtgtggtggaatcagtttaatcagaaaaagacataccaagtagctggtgctaattattataagactaacattctgataagccatggtataattaacattattaaaatgtttacatataatccttcttaaagtatactcttttaaaaatccattgacataaccttacttttagtttagtgatccagaatttccccagagcttaagccactgcagtaaattaggtacgtaggatattcagtcgctactagccacaaggagtctccttattttaatgtacctccctcagtactttattcctgcagagcgcctcagagtgggggagagaaatgagcaatcctggctcagttggattatttcagcattttatttctaaatctgtagtgtgatcagaaatatttaaaattaaacaaatactttacagagagaggcctactaatcaatgtgcttagagaaacaaactacctttacattcaattaacaacaaaaaaagttacagaaattttaacaaacatttttctttatctgagtatgggagaaaatactaatgctgacacgtttaataattagaaaagatcattccagatcttatggaaaattgtgttttaaattccagcagtttgctcttgagacatggtaatctcttaatgtaactactaaaggagaggtagattgaaaagatcttgtatatacataattatgtcagatggttcaagatatcaaaataaattgttttgttgaaaatg

SEQ ID NO: 471 - DNA, 389 bp, Homo sapiens
  misc_feature: Incyte ID No: 176928.1
  unsure 307: a, t, c, g, or other
atcttctcaagtacttctacaatatccctgttaccagcagagatgaatggtcaattatcttgaaaaactgtagtacatacaatgacattctgatgtagttgtataaatagttgataaccagtaacatttattactcagatttatcgcctacttcagtaaaagattacttccaaaaactctattcactctcaatcgataatagttgccatcactgaagatactcagaagatacaccaaagagttctgaaacgggagtctaaatacattttgagaaactggcatcagaacaatgtctagtcccttttgnactattaacacactagtgaatatatttccagcaagtatattggtataataaacacgtcctttaaaaaaatctttgaaatatg

SEQ ID NO: 472 - DNA, 1726 bp, Homo sapiens
  misc_feature: Incyte ID No: 197252.1
tcacaaggtatttgctaaagcattttgagctgcttggaaaaagggaagtagttgcagtagagtttcttccatcttcttggtgctgggaagccatatatgtgtcttttactcaagctaaggggtataagcttatgtgttgaatttgctacatctatatttcacatattctcacaataagagaattttgaaatagaaatatcatagaacatttaagaaagtttagtataaataatattttgtgtgttttaatccctttgaagggatctatccaaagaaaatattttacactgagctccttcctacacgtctcagtaacagatcctgtgttagtctttgaaaatagctcattttttaaatgtcagtgagtagatgtagcatacatatgatgtataatgacgtgtattatgttaacaatgtctgcagattttgtaggaatacaaaacatggccttttttataagcaaaacgggccaatgactagaataacacatagggcaatctgtgaatatgtattataagcagcattccagaaaagtagttggtgaaataattttcaagtcaaaaagggatatggaaagggaattatgagtaacctctattttttaagccttgcttttaaattaaacagctacagccatttaagccttgaggataataaagcttgagagtaataatgttaggttagcaaaggtttagatgtatcacttcatgcatgctaccatgatagtaatgcagctcttcgagtcatttctggtcattcaagatattcacccttttgcccatagaaagcaccctacctgcacctggcttactgacattgtcttagctgatcacaagatcattatcagcctccattattccttactgtatataaaatacagagttttatattttcctttcttcgtttttcaccatattcaaaacctaaatttgtttttgcagatggaatgcaaagtaatcaagtgtttgtgctttcacctagaagggtgtggtcctgaaggaaagaggtcccctaaatatcccccaccctggtgctcctccctctccctggtaccctgactaccaggaagtcaggtgctagagcagctggagaagtgcaggcagcctgtgcttccacagatgggggtgctgctgcaacaaggctttcaatgtgcccatcttaggtgggagaagctagatcctgtgcagcagcctggtaagtcctgaggaggttccattgctcttcctgctgctgtcctttgcttctcaacggtggctcgctctacagtctagagcacatgcagctaacttgtgcctctgcttatgcatgagggttaaattaacaaccataaccttcatttgaagttcaaaggtgtattcaggatcctcaaagcattttaaccttgccgcttaaaacccaatttaccgtgaaatgggaattttgctgcattgttaaactgtagtggaaaccatgctatagtaataaaggttatataagagagaaattgaaattaaatgtgtttttaaatttcaaaaaaaaatcaatctttaggatgacttaaaaattgatttgccatgtaaaatgtatctgcattttttacacaaaacttgttttaagcataaaattttaaaactgtactacttgatgtattatacattttgaaccatatgtattaaaccataaacagtataatgttgttataataaaacaggcaacaaatttataaataaaagctgaactactctct

SEQ ID NO: 473 - DNA, 837 bp, Homo sapiens
  misc_feature: Incyte ID No: 1975480CB1
actcccggttcgcggcgctgggagcggccgtgacgtcaggcgcccggctgctcctcacttgctctgagacaggtgcggcaagtctactgcgggctggtccgggctcctcaggttcagacccgaccgttatccagtcggttcgtggagaggagaggtgcactttacaggtccccgatgaaccaagagaaccctccaccatatccaggccctggtccaacggccccatacccaccttatccaccacaaccaatgggtccaggacctatggggggaccctacccacctcctcaagggtacccctaccaaggatacccacagtacggctggcagggtggacctcaggagcctcctaaaaccacagtgtatgtggtagaagaccaaagaagagatgagctaggaccatccacctgcctcacagcctgctggacggctctctgttgctgctgtctctgggacatgctcacctgaccagaccagcccagccgtcctgtcctgccagctctgctgccacctctgacaggtgtgcctgcccccatctcttctgattgctgttaacaaatgactagctttgcacagacacctctaccttcagcactatgggattctagattaatgggggttgctactgtttaattcagtgacttgatctttttaatgtccaaaatccatttcttattgatctttaaagatgtgctaaatgacttttttggccaaaggcttagttgtgaaaaatataatttttaaattatacattcaaggtagtggccaaatgtaacacatcaatcatggaatgatttctctgctaacagccgcctgtatgtttcaataaatttgccg

SEQ ID NO: 474 - DNA, 2346 bp, Homo sapiens
  misc_feature: Incyte ID No: 200578.1
gccagaggggaaaaaaagagtaatgcacaggtatctcttttgcagtggtgactgtattttgagtaccttgttgtgacagggtattattacagcatcttgtgggaaaacctattaggcctttgcatgtttaagctgtataatttgttgggttgtgagtggtctgacttaaatgtgtattataaaatttagacatcaaattttcctactaactaactttattagatgcatacttggaagcacagtcatatcacactgggaggcaatgcaatgtggttacctggtcctaggtttgaactgtcttatttcaaaagatttctgaattaatttttccctagaatttctccttcattccaaagtacaaacatactttgaagaatgaaacagattgttcccatgaatgtatgctcatactcgactagaaacgatctatgttaaatgactgtgtatatgaattatttcaagtactaccccaaataactttcttattgctctgaaagaagaaaagcaatgtaaatcactatgattattgcacaaacaaccagaattctccaacaattttaagtaatctgatcctcttcttggagaaaattgttacctaatagtttttccttatgaatgttattactactggtataaatcaaatttctataaatttcctacttaagtcttaagaactgggttcttcctttgatgttattcatgttcagaaaggaaacaacactttactcttttaggacaattcctagaatctatagtagtatcaggatatattttgctttaaaatatattttggttattttgaatacagacattggctccaaattttcatctttgcacaatagtatgacttttcactagaacttctcaacatttgggaactttgcaaatatgagcatcatatgtgttaaggctgtatcatttaatgctatgagatacattgttttctccctatgccaaacaggtgaacaaacgtagttgttttttactgatactaaatgttggctacctgtgattttatagtatgcacatgtcagaaaaaggcaagacaaatggcctcttgtactgaatacttcggcaaacttattgggtcttcattttctgacagacaggatttgactcaatatttgtagagcttgcgtagaatggattacatggtagtgatgcactggtagaaatggtttttagttattgactcagaattcatctcaggatgaatcttttatgtctttttattgtaagcatatctgaatttactttataaagatggttttagaaagctttgtctaaaaatttggcctaggaatggtaacttcattttcagttgccaaggggtagaaaaataatatgtgtgttgttatgtttatgttaacatattattaggtactatctatgaatgtatttaaatatttttcatattctgtgacaagcatttataatttgcaacaagtggagtccatttagcccagtgggaaagtcttggaactcaggttacccttgaaggatatgctggcagccatctctttgatctgtgcttaaactgtaatttatagaccagctaaatccctaacttggatctggaatgcattagttatgaccttgtaccattcccagaatttcaggggcatcgtgggtttggtctagtgattgaaaacacaagaacagagagatccagctgaaaaagagtgatcctcaatatcctaactaactggtcctcaactcaagcagagtttcttcactctggcactgtgatcatgaaacttagtagaggggattgtgtgtattttatacaaatttaatacaatgtcttacattgataaaattcttaaagagcaaaactgcattttatttctgcatccacattccaatcatattagaactaagatatttatctatgaagatataaatggtgcagagagactttcatctgtggattgcgttgtttcttagggttcctagcactgatgcctgcacaagcatgtgatatgtgaaataaaatggattcttctatagctaaatgagttccctctggggagagttctggtactgcaatcacaatgccagatggtgtttatgggctatttgtgtaagtaagtggtaagatgctatgaagtaagtgtgtttgttttcatcttatggaaactcttgatgcatgtgcttttgtatggaataaattttggtgcaatatgatgtcattcaactttgcattgaattgaattttggttgtatttatatgtattatacctgtcacgcttctagttgcttcaaccattttataaccatttttgtacatattttacttgaaaatattttaaatggaaatttaaataaacatttgatagtttacat

SEQ ID NO: 475 - DNA, 1263 bp, Homo sapiens
  misc_feature: Incyte ID No: 202117.4
aaatctacaagcaccaggaagtcaagatgcaagcaccagccttcagggacaagaaacagggggtctcagccaagaatcaaggtgcccatgacccagactatgagaatatcaccttggccttcaaaaatcaggaccatgcaaagggtggtcattcacgacccacgagccaagtcccagcccagtgcaggccgccctcagactccacccaggtcccctgctggttgtacagagccatcctgagcctgtacatcctcctggccctggcctttgtcctctgcatcatcctgtcagccttcatcatggtgaagaatgctgagatgtccaaggagctgctgggctttaaaagggagctttggaatgtctcaaactccgtacaagcatgcgaagagagacagaagagaggctgggattccgttcagcagagcatcaccatggtcaggagcaagattgatagattagagacgacattagcaggcataaaaaacattgacacaaaggtacagaaaatcttggaggtgctgcagaaaatgccacagtcctcacctcaataaatgagaggacattgtggcagccaaagccacaacttggaagatggggctgcacctgccaacgaagacgggaaatgacccccccccccagcctagtgtgaacctgcccctcgtcccacgtatagaaaaacctcgagtcatggtgaatgagtgtctcggagttgctcgtgtgtgtgtacacctgcgtgcgtgtgtgtgcgtgtgtgcgcgtgtgttcgtgtatgtgcgtgtgtgcgtgcgcgtgtgtgtgcattttgcaaagggtggacatttcagtgtatctcccagaaaggtgatgaatgaataggactgagagtcacagtgaatgtggcatgcatgcctgtgtcatgtgacatatgtgagtctcggcatgtcacggtgggtggctgtgtctgagcacctccagcagatgtcactctgagtgtgggtgttggtgacatgcattgcacgggcctgtctccctgtttgtgtaaacatactagagtatactgcggcgtgttttctgtctacccatgtcatggtgggggagatttatctccgtacatgtgggtgtcgccatgtgtgccctgtcactatctgtggctgggtgaacggctgtgtcattatgagtgtgccgagttatgccaccctgtgtgctcagggcacatgcacacagacatttatctctgcactcacattttgtgacttatgaagataaataaagtcaagggaaaac

SEQ ID NO: 476 - DNA, 447 bp, Homo sapiens
  misc_feature: Incyte ID No: 204750.3
aaaaaataaaaaaagaatatggaagcaaatggagaaagggaggaaactgaggtcaggcaaaccttccagcaatcagttctgcccagagaacatactgacgacagagaacacactgagcgtatctgcttctagttagagcattgccgattgccttcataattcataatgtgctgtgctcctctgagggtctatctgtatttctcttcaaagaattccctttttaaattcttgcagctgggttttaagacacaataatggggcaaattaagttttataaacttggagatttttatgcagtaaataaaaaaataatatgtactagtcacccctgaaactgcattcttagaactcgactcttgttttatttaaatacgtgcgtagatatctgtgaagattttcatgtacctatttaccttgtcactaataaaattaaaactgaaagacttg

SEQ ID NO: 477 - DNA, 702 bp, Homo sapiens
  misc_feature: Incyte ID No: 205232.1
agaacctagcggccgaaaagagtcccaggaaatgtgccccccgggattactggtatttgctggctcctcggaacaagatgccaacttggctaagcagttctggatctcggcgtcgatgtatccccctagcgaatctcagctggtgctgcgcagagacagcagtcagcgtctgccggtggcgcggcccaggaggagcagagggtctgaaaacagccactcctcgcagtcttttcaccttgcgagtaacaaaaatagagacatctttgccgaagccctaaagatacaggaatctgaggagaaagtaaagtatctccaaaaggctaaaacaagagaagagattctccaactcttaagaaaacaaagagaagaaaggatctcgaaagaactgatttcccttccgtataaaccaaaagccaaagaacacaaagcaaagaaagtggtatcagagtcagataaagaggaccaagaagaagtcaaaactttggactaatttgcttgacacatggcagaggatggctcacttataccttcactttggaaacaaccttctcttagatcaggatcattgagatcactggcaacattatagtagacaaagaaatacaagttaaatacgcagacttccaggaattttaccagttagtgagtacttgtgttaaaataaagaaataaaggttaaatatgcaggcttctatgaattct

SEQ ID NO: 478 - DNA, 610 bp, Homo sapiens
  misc_feature: Incyte ID No: 212157.1
  unsure 53, 59, 134: a, t, c, g, or other
tgagaccactgcatatgattatattacccttaacatgtaggtgaggagttggnaacttnaaaaaaaagttatgcaaactgtatcggctcctgcggctttctgttgtacaaaaattgaccaagtatctgaatagnttagaagaatcttaactccaaaaacagctcaaaatcctctgtgccagttgtattcccacaagtattgactcgatactatcgtcatccatgagggcatatggcctgccggatgatctgaagtcagtgagtatgtgcttagggccaaaggggaagggacaaaaagttactcttttcagggctcaaagctaaaaaaaccaccaggcagtgaagatgttactataatggcagaacagttttaatcaaaaggtgatgaatctggaacctagagataaggcacagggcaaggaatacaagaatgtgaccctgtcttcttttcctggctttgttttattggactttggcaaatcacctaattacccttcttcaatctccttatcataaaatgagagggaggtaaggaagagtgaactgtggaaggttagaactggttccttccagttctaacactatttccaatccatctagattctctgaga

SEQ ID NO: 479 - DNA, 1419 bp, Homo sapiens
  misc_feature: Incyte ID No: 221846.4
cacattccaaagtgagatttctgactagcagtgacttttctagggccacgtggaaaagttgataagtatccttttctgcaggacagagtagactggtatctctgactcatccctgaaaaatctaaatggcaagagactagctggctctctgatggggaggaggttgttgttttggttgttctctacagacatagtcagggcaaaaagcatacacatgctttccatggaccagagagacctggcctgggttgtctcaaatcctgtccacaaggcaactccagaagaaagaagccctttacatttccataaaacactttagaatcagctagtcaatttccacaaaataaagtgctagaatttgattggatttaattgattatgtagaacaatttgggggccatttgacatcattaaaatattcaattttcctattcattaacatggtatatctcttcactttaagtcttttgtatgtttctcagaactatttttgtggttttcagtaaagtgttcttgcacatccttcaatagatttattcttagacgttttatatttgtttatggctagtatatacagattctgttgctacaaaactatgttgaccttgttatccagtgagtggccttgtgacattcatttaaattataataatttgcagattatttttgtataatcatgtcctctgtgaatgacagttttatttcttcctttcttaatctttatgccttatttagctcttgccaaactgcagtggctgagcaattggacaagataaagaaataaaagtgatccagatcataaagaaagaagtaaaactatatctgcacatgacataatcttgtctatggaaaatcctaaggaatccacacacaaaaaaactactagagctaataagttcagcaaggttgcaagatataaaattggtatacaaattgcagtggctaggacctccagcagaatgctgactataagtagtgatagtgaggtattcttgtctcatcctcaatctcaggggtggtgggtgtggcatgtggagagttgtcaatattcaccatgaagtttgatggttgttataggatttttaatgtactcattaacatatattctcaagctgttaaaaagatttttttaattacaaataaggttaaatttctctcaaatacttactctgcaccttttgaaataattttatttttctcctttattctttggatgtgatgacttatactaattgactgttgaatgtcaaaccaaacttaacattcttgtaatagaaaccagcagggtgtgtacacttttgtgtgtgtgtgcaggtttatacacataaacacaataatacttggacttatttatttaaaatttagatttattagagggagcatggccataaaataaaataaaataaaatttagatttaa

SEQ ID NO: 480 - DNA, 377 bp, Homo sapiens
  misc_feature: Incyte ID No: 222092.1
gtagagattgcattagttccatatctccgcagagttctctggtagattaaatgttctctgtgcactaggccaaggaagttcctgttacctttgaaaatcattgtgtttgctctgattgtctacattagctcatatcagtcttttgaacactggttcaaatctgggtgttgggttaggatctgatgagtagagaatagtggaaagttgatataggaaggtatactggtttctggtgtgattctttagctacatttattccttgtcttatgtcatttcactggatcatgtaactgtcctggctttcagaaattatattagatgcccagcctttctcattcagagatgcctgtattattatgttatttcgattgcctacc

SEQ ID NO: 481 - DNA, 1479 bp, Homo sapiens
  misc_feature: Incyte ID No: 228350.1
  unsure 778: a, t, c, g, or other
gtctttggtagaattctatgattctaaagtgctgtgactacaagtgtggacaggtgtaatcactttacctctacactgcccgctgcatgctgacactgcctttcatatggtgggcattcaacagcaacattcctgtggagtatagatggctatgactaaggtagtgtaagtggtggtccttataaaatatgctctgcttgccttaggggaaaatagttccttaaaaacgttctcatccaactcctcagtgttaagatatctaaacaaaagtgaccacatctatacacaacagtaatgacacctgaaagaattttttaacagataaagaacagtactcccatggttatgtaaccaaccaactaggaaggagagactttaaaattgacaacatcccagagatgttatatcctaagttatgaatgtgctgccgttgaagaaaaatcagctttctcatattactcacatatatatattattacataacaatgtgttaaattggactacagtgaatcaaagagttattgcagcttctgaaggtgacagacttttaactttcagatattgcttaatgcctgggaaaccctgggaaccacgccaagtcaatttaaccaagcttttgctttttagccagctgtgatggtggtttctacatagtctggataaatccaagaatactttcatggccctagtgaaatttgcctttttgaaattattaggaaaacgaaatacacattatgaaacttctatcactcctaaagaaaggggaaaacctattaanaatgaagctcttatttactaatgcatttctatttcaggagcatttggctaaactggggacaaaaaacaaaaacttgttcttaattaacaaaagaactagaaagaagctcatatgaaagcaccaccttgtgttcagtaagcttcaggatagctctgttgacagcagggcatttagagagtcccaagtatagtcatgtatcactggggagggaagaatctttgaggacatctagtttacaatctttattatttttcaggtgtagaaaagagattaaagatcatagaagtcagaataaatttgtaaaagttctcatagtcaaaacagctaagtaatggcattgcccagactccaaaatcctgaccagaatataaatcaccaattgttggtttaaaggggttatttgtgaatcattttccaaaaaaagaagtacactttttgtgttacttaccatttcaaagaaacttattcttcaagaccatttcagatttccttaggaatgtatgtgttacccataattgaccacttcaaacttgtaagaaaaaaaatgttatggtcattttgttatttttagagacaaagtatttctaatctaggtttgcatacaaccttgaggctgtgagatcattagtcaattgctttaattataagccctgtttttttttaaatctaaaaactaataaacatctataaggttaaaaaaa

SEQ ID NO: 482 - DNA, 562 bp, Homo sapiens
  misc_feature: Incyte ID No: 229170.1
  unsure 191, 201-202, 212, 385-431: a, t, c, g, or other
tgtttcttccagtaaattcagccggtgagctcagaggagcaaagagaattctccagtgtggcgctcacaaagtcctcagccctgcgttttagcattgaataccaccaggccatcagtgtggctggggtgaactctccatcaaacttgggaaatcactaaactctttgcatgctgaatagctatttatatantatataaatnnataaatatanatattatatatcgctctctctcacaaatgcaggccacatgtcaaattcagctttgctttctacaaatgaatgaacttaataaaaataaacgttggagggggtatttggaaagacatctatttaaatttttattacatgtttgatattaaaaactaagaatggtttagataaannnnnnnnnnnnnnnnnnnnnnnnnnnnnnnnnnnnnnnnnnnnnnncacactacagataaggcttttttagaaaacacattagctaacaggtgatatggaacttcaagtgttttgttatatagcatggatgttttattttgcatatcggaacataaagccattttacaactgtaaaa

SEQ ID NO: 483 - DNA, 617 bp, Homo sapiens
  misc_feature: Incyte ID No: 230820.1
ctgttgtgtttatatgaccacataaagagtgcttgagttaacgtgtctctccactctatttttctactccttgccttcctttataaatgtactagttctcctttcactttcttcagactcagcagacagtacattacagttaatagttttctgaagcagcctgatattcatgctctatggaacccataagacttctattatttgcattatatgtttaattggataattatgggaaccatgttgaactgttaacaactgtcaagcctttgattaatcttttgaatgttcattggcatggttcaagttagcaaccacaatacagattttaggtttttatttttgctgctctcacaaccatttgagagggtaaaaatgatttttctagaaaaatataatatcccattttggctcaccgtacatattgtggcacaaagagctatgtaacttatgtattgccataatttcctttgcatatgaagtattgtagtttaatgaatctccagaaaattataagaaagtcttattttttaaatgatcacaactatataacatataaaagaatcctagtcttcctccaaggaaaccagttatcagttcggtctgtagtctccctgacc

SEQ ID NO: 484 - DNA, 792 bp, Homo sapiens
  misc_feature: Incyte ID No: 231160.1
gaaaaaagaaaaattgaagaacataacttttctacttatgaaatagataattttttaaaattgtttaaactcctggaaattaagtgttattttttattactgcagttgagagataccttttcagaggaaaacaagaggctaaattccatgttaagagctaagtagtatttttttcttaacaattttgccaaaatttcttctactggaccaaaaggaaataaatctacaataaatctactttctaaatattatttaagatgggaaatgtcttttataggtatattctgtataatacccttaattagatgaattatcccttatcattccaaaaatgaaatgctgtgttaaatatctccagggcaaagtggtatgttgactgggacaaacgttagaaattgtattgttcattgcacttgttgccctgttccccaagcttgtcaatgtttagagatactattcgggttgctaaagccattattcatagaaaatttctgcccctacagaagtgtgtgcatgggccttggaaaatctacatgtgtatatctgagtagcgaagcacagattcactctaattgaaagcagcagtttggttttgtaaatgtaattgcaattgacactttcttttccctttcagttattattttttttaaaggacgttatgagaaggcactatgaaaagcctaattggaatagcattatgaaccatgtaatgcatgcccatgcacactgtgatttgcaaacatatgtccgctcttcaataaatgttacggctttcaaaaaaaaacaaaaagg

SEQ ID NO: 485 - DNA, 1258 bp, Homo sapiens
  misc_feature: Incyte ID No: 232212.1
taataatagtatttacctcacagagctgttgtaataaatgaattggtacacgtaaaacacttagtagagtacatgtcacatagcaaatcctataaaagtactagttattacaattaacatatcagttctcaatatatgcccaacccttacctggtacattatataaccttaaacataagaaaataatcatggaagtaactccttgaatgaattctggtattttaagcccatttcataagaccaataatgttgaccaatctactcatattcacacagtacttctacatataccatggtctatatgagcggttgaagaaatagaaaataaaatgcaaatcacaagatgtccattaaaacagtctacctttttcctttgacagccattaattcttcttaaaatgtattgagaaatattttataatagatatacaaaagggcataagctataactagaaaacactgtacaactctctcatagattaagaaatagaaaattaccgacatgggaaaaataaatcccttgtgtatcactaccacctccagaggcaatcattatcctgaatttgttgttacaattccatggatttccttatatttttgctgcatatgtatccctaactaatatttagaatcttcacatgtgtttcatcttgagagaaacaagatttttatttctctcttattcaagaaacaagagaaacatttttgaatatttcagcagcttagttttttgtttgtctgctttttattttctaagttcaacactatgttgatgaagacccctatacaagtatgtgcagagtcagctcattaattttcactgctgcataatatattacagtctataaattagtcataatttacacatcgagtttctcctcatggattttttttatgttttgctactaaaaacaatgctgcaatgaatactcatgtgcctgttttcttgtgcatctgtgtttctccaaattatgctttgagaagcataatgactgattagtgggctaagcacatcttccccattgctgaatattgccaaagagcagttggcttcccacagcagtgtattttggttcccattgtttcacatccatgtcagcctttggtatttcaaggattactgtattttttttttcaatttaatgagtacaaactctactatttcatgtgatctgtgatcctcacaagaaactgataaagacacactttataggaaatgtaacaaactccagctatagtctaatataacatcataaat

SEQ ID NO: 486 - DNA, 3819 bp, Homo sapiens
  misc_feature: Incyte ID No: 234090.1
acttgaagagcataggttacagaagctgcagtatttattattatgctttctttctctcattctctcgtgcctggagaggggagaccacccttcgctcatatacggaagctcctgaccatctgggcctacagcacttcctcagtagaaatgactgtggcatgcccacgttactaccttctgcctctctttctgcctctcacggacttgtgagtgtgaaggacaagtggatgacttctcactggactttccttctctgtctcttctgatgatgcctaaaactatggataaccaattctcctgagtgtagtttccaaacaaagagaccaaagctccatgcccaggtccaaaggccccatagaagccagtgggagtcatcgagaggaaaggcgctctgtgagtgtcaggaccttggtggccaggatagccatcagagtgtccaggcctcccacattaccttggatccgagcagccagctccaactgttctgcaagcagcactggagtcagggggtaggaggacaagtggaagcaaaggtgtgggactggggaagacaaagaggaacaagctgcccttcctcacttttcaaagggtcaggaatcctaggctatgatgctgggaagctagaccagctcctccaagagagactagaccaggtcattttctctgttattaactctgggctccagcttctccgtgccctgctttacctccaagtggttccaatttccaaaggccctgctgaccacatgtgattcccaggagagggctgggggaggggagcgcagaggtctggcttccatccttggcgtgtagctttggatcgctgtctaaccacacagcagacgttgcccggtctccccagctctagtttcttgcctgaatgcggctgacaaatgggaagagaaaagcattcagcaaaatactcaggaaacttgctgttttcattataattcacaaccagccatgccaaggccactttcttttgaaaatccacttctttaaagtttctcaggccctattagtagcctgaaggaaatactaatgactggccttccgcactaagccaaagtgtttgctcttcatagcactcaaagcttatcagcgcagagcccataatttatggagataaaaggaaaggagatataggtaagaagagtgtgaccaggagaccttatgctacctgtaaaaaagttcagcccaccccatctaacttctgagctctgtttgggtgaagattttctggccgcatggctgctcagactggcatccaggctttgctccaccaagaagttaaaggcagtcggacatctcagtagcatctctaccagcccttaactcaatgcatctacctggcatctcccagcagttacttttggagacgattcactgcccctggggcgtttccttgaaggtttgtggagagcgtggagaatgatggggcaatggccaattggagggtggagagtgaagagccggagctggctgtgagtggtttggccacatttctcaggattccatgagagagttggggaacttgggctgacaaaggaagtagcctggggcatccttaaggaaggaattaagaaaagggaaaaagctggactcaagccacgccatgagggtgaaaggttataaggccctgccccctttccagctgcccacctgttcctcctccacacctcttcgctttgggccaccaagaaccaatgaagtccacaccctttggatgagaaaaagagggagttggttggcctctcttctccctgttatccaatttgaggatattttgaccttgggtaaggatgaagtgttaaagccacagctcctctccacaagaagccattcatcttgggggaggcagagagggaagtctctctccaaagtctatccagcttcgcttcgtttcattgatctgcacaagagacaatgctctggaaaaggaagaggaccccagaagggtgcttggcaagacagaggatgctaatgggcaatggagagcactccctccagctggcccctgctgctgcctcccgtcctctgcatggggtcaggtgcttctgtgcttgctgtcctacctctctccacagcagggctctcaaaaccattttgatcccccattggcagagggttcccctctttacagagttcagtcattaaaagcatggatcagctgttaatctcattggaggagggaactgtttcctgcattcattcatctgggaaccttcttgagtagccactgtctgccagccactgctctagagatgggaaaacagcacggaacaaaaccaaggtctttcttccagcgaatttatatccttcaggaagctggttcctgccaccaacttagcaggcaacagttctcctcccctagtggcacagggtaccagttttgtaggaaaagtggtccagcaaaggaagaaagcagaccaacccagctgccttaccttattctggggccattcccccagcgatgagagctgctcttgtttctactgccaccatctcttctggctgcacttcacctgctgcttgagcttctgaccttccttcagttccaccaaatgaggacaggaaatagcagtcaagacccctggccctgctgagcgtgaaacagaagcaatggatgagtgctggacgaagaatggcctgggcagaacaaatagggagcatttgaaagcttctggctgataaatctccaggtgcatcccggttgccacgcctgcccccattaacctgctcctggtaaatactgatccagcagctgctccaggagaggccgtctttttttcccagccacgctgtgtcttgcatgagactcctggggcctgggcacagagagaaaagaattgagactcaggaggctcagtgggtgagaaaatgcaaagtggcttcacagacacagggctgtgggagcagatcgacggggaacttgggagatgaacttcagggccttccgacgccttgtctcaggaacatgctttgagaaaaatggtagcatcctttccataactcagtctctcttccctagtttccctgaagtgtgacgttttagtatctggagctcagtgatccccatgaatgagggataaagtttcactcttggtattttctaactagtgctagggaaagtcctgagacacgatcacagccactgcttggcatacagggcctccacccaataagcaaactggagattcctcagcctctcgtggacacccacatctcattcttctcacagcagagaagctctcccttcagcctgagctgtcttctttctgctgcagtgcagcctgctccctcctaccctggcctcaaggaaggtgggaaacatcttctgcatttcaaagtcctcactttgacttatttggccttcatcttggcatggaaggtggcaggcagaatggaaatactccccccaaacagaacagatattcttgcgtgtgtaagggcagaagggacaagctctctatcccatgagactaggggccggagcccacctgcctttccccacaacttttcctgctcaaacccactcctcttgacacactggaatctgtattatatatatttttaagaaaatacaatgatggttgtctggttttgttgtttttacaggtgttgtggaataaaaactgtaagaaaattaagtatttaaaatgttccaataaagtggggttttttgttattctaatatattattgtgtacctattgtaaatatgaaacactcctattttgcaagctgaggacacaatttgtactgttgttatatataaataaagtttactgaattaaaaaaaccttaaatctttaaataa

SEQ ID NO: 487 - DNA, 1162 bp, Homo sapiens
  misc_feature: Incyte ID No: 236432.1
  unsure 68: a, t, c, g, or other
aaacgtgaccttctattccacttaaacacaccactgtgggagttgtttgcttggactgatgagaaganggtaattttctccatctctaaatcctcctgaactcactgaaaaactcattaattcccgcagaacataaattattgcttttgagctggaagttttctcttcattaggaagcttactgccattttgatggagcttgaagcccccattttgatggacttctagtctgtctttcctgttatggtcatttattaattttcactaatccatatattctttagacaaggagagtcaagaaactacttgtcatagatgaagctctgagttacttttacccatcaggtagctgtttagtcaataataaacagcaccaaaacaggattagcagagctcttaaaaacagccttaaatacacactgagtttagaaaaatgtaagaaaatcattgttttaatctacaaattcatatgcagttgcagagatgcaaaagagatcagagtaagttaaagtaggaaaggttttataaaagtattgatggctgtgtcctcatctgcatttttgtttttatgatagggctgatattttcaacaacgaaacacccaatgttcagaccttacctcagtctaagagctggctccacagttggtagcaatggccctgttaggcagactgtccccctctttgggaatggaaagaagccctgcctggatgcatggagcagatggatactgacaccaaggacattcagattttctttcctatacctattttcataaaatttggaaagaaaaactatctgcagtatttttttaaaacgacttctgctattcttacttagagaaatccagtgatagcacctcatgtcttcagaggagcaagaagttcaaggagttaaatgtcacattcatactcaggtaatagagaagaataaaacacatcaggtttgcttcatctatcctaagtggtgcttaggggttcagaaaaaatgtttcaagtacaggaaattaatgagcaatatttacaatgtattttaataaaagggatttttctagttaactctgagttaagcacgaactcctttcttttgttaattgttggaaataccattaagatgtatttgtctgtttttctgcattggcaagtaaagaacataaaacaaa

SEQ ID NO: 488 - DNA, 821 bp, Homo sapiens
  misc_feature: Incyte ID No: 236497.1
atgaaaggggataatgtgaatacaaaaaagaagcctagagattgaaaataataataatagaacatgttattaggagatggtacttaatgtcatgttggagttggagttttcaaggttacctctatataaaattggattattttctgttagatataatgtgacaaattaaatgactttatcccaaggtacagtgaggtaaacaaaaatctattcttagatatccttagatttggttaactgaggctgtagaagcagcgaattgtctagccatttaagttatttttgtaaaattcagcataaacatcaatctctaatttctatctagaagtgactttaagacattacaagaacattgccaatttggaaaatgccaataaaatactgtagacttattaatattgtagacttattatcagccttttactatagcttaatttaattatggttttcatttttactgtaagaggccaagacttcacttatgtctcctgtggagctgaggctcctgggccttgttattataacaaactctggctccttgtaatgatgcttactagctcaaagccttctccagcattcagtgttagcctttcattgcctggatcttcttacaaagccatagcaagtggttagtgccatttgctccttggtgttgagagatatacctgttaaatgaggcttctttcctttctcattcatagccagcgtggaaaaatcatcaggtagtttgcccagatttgccagagccctaaataaaatggcaaaacgatctccctgcctgcttctcctccccacccccacttacatgcacaccgtaaatc

SEQ ID NO: 489 - DNA, 647 bp, Homo sapiens
  misc_feature: Incyte ID No: 237208.4
aagagggaaaactgcatctcagcattttcatttttctgaatattaagtgaaaagccaagttctatttgtaagaaatagcttttgctgaggagttgtgaattcctgcacctgtgtttgatgttatttgtatgcaatggattgctggccctttgttcctaagcaagagaagaccaaagatgcttccccatgacctctccggtgaggatccgcaccccccggacttgctctctgatgaagggcatgtcgttcagtgccccagcagtcagaagcagtttttgtggaactaaaactaataatgttaccctcacaaaggaaatgttcttttactaagtaagttattgctgattcttgaatgtctgttatataactgggtcggctatcaagaaggaaggttatatttcttatcacattttaagttgttaagcaaatgtgagtttttttttaagaaatgaggctttcactgagatttgtgtgctattcataattttaggaattactgcttagaacagctgcttgggtgtatttttctacacaggtctgtacttctgccactttctccttttaaaaaaacaaaactatgcatattatgtattaaagttttcttggttttatatatcagagaataaaaacttttttgacttttgagt

SEQ ID NO: 490 - DNA, 2445 bp, Homo sapiens
  misc_feature: Incyte ID No: 2484813CB1
gcatcttggcagggtccggggacgtggactatttcgcacaccacaccacggggagggatttttttctattttccctacgaaaaacagatctttttaaggatggtgctgctccactggtgcctgctgtggctcctgtttccactcagctcaaggacccagaagttacccacccgggatgaggaactttttcagatgcagatccgggacaaggcattttttcatgattcgtcagtaattccagatggagctgaaattagcagttatctctttagagatacacctaaaaggtatttctttgtggttgaagaagacaatactccattatcagtcacagtgacgccctgtgatgcgcctttggagtggaagctgagcctccaggagctgccagaggacaggagcggggaaggctcaggtgatctggaacctcttgagcagcagaagcagcagatcattaatgaggaaggcactgagttattctcctacaaaggcaatgatgttgagtattttatatcgtctagttccccatccggtttatatcagttggatcttctttcaacagagaaagacacacatttcaaagtatatgccaccacaactccagaatctgatcagccataccctgagttaccctatgacccaagagtagatgtgacctcactggggcgcaccacggtcactttggcctggaaaccaagccccactgcctctttgctgaaacaacccattcagtactgtgtggtcatcaacaaagagcacaatttcaaaagtctctgtgcagtggaagcaaaactgagtgcagatgatgcttttatgatggcaccgaaacctggtctggacttcagcccctttgactttgcccactttggatttccttctgataattcaggtaaagaacgcagtttccaggcaaagccttctccaaaactggggcgtcatgtctactccaggcccaaggttgatattcagaaaatctgcataggaaacaagaacatcttcaccgtctctgatctgaaacccgacacgcagtactactttgacgtatttgtggtcaacatcaacagcaacatgagcaccgcttatgtaggtacctttgccaggaccaaggaagaagccaaacagaagacagtcgagctaaaagatgggaagataacagatgtatttgttaaaaggaagggagcaaagtttctacggtttgctccagtctcttctcaccaaaaagtcaccttctttattcactcttgtctggatgctgtccaaatccaagtgagaagagatgggaaacttcttctgtctcagaatgtggaaggcattcagcagtttcagcttagaggaaaacctaaagctaaatacctcgttcgactgaaaggaaacaagaaaggagcatctatgttgaaaattctagctaccacaaggcctactaagcagtcatttccctctcttcctgaagacacaagaatcaaagcctttgacaagctccgtacctgttcctcggccaccgtggcttggctaggcactcaggaaaggaacaagttttgcatctacaaaaaagaagtggatgataactacaatgaagaccagaagaaaagagagcaaaaccaatgtctaggaccagatataaggaagaagtcagaaaaggtcctctgtaaatatttccacagtcaaaacctgcagaaagcagtgaccacagaaacaattaaaggtcttcagcctggcaaatcttacctgctggatgtttatgtcataggacatggggggcactctgtaaagtatcagagtaaggttgtgaaaactagaaagttctgttagttaccttcttatagagatatattatgtagaactccaggagggacattaaatcactttaagtataaactgactactcccacagttgagagaagttgtgacctgtacttgtactatggaaggaaggatatcaacgtgtgtatattgatgtttatataagtaactcttgaaggagacttgttctagcgtgccccatggtacctagtgtgtgtctgatgccggttggtgtcaaagatagagggcttcttgaaggaacttgccattccttgctttgaccactgcatgaactgcttctaaattattttattacctaaaaatttaaaatatgccattcattgcacacacccacaaatgcaaatcattcctctctatagatgctaggatatatataaattattttataaattcttgttttaaatgtcagtgtttctatgattgtaaactattaaattcttttcctattaaagtacagatctaatctaagtattattaagttgatagccctctagtcagttatattgctattgtaaattcttgtttgttgagtaaaatgtttaaatactatatgtatctcatgtacaaagttgacatacattatattcatgtacataaaattaaagagattagattatatagtgttca

SEQ ID NO: 491 - DNA, 657 bp, Homo sapiens
  misc_feature: Incyte ID No: 249104.1
ctaagaggctgacgggtaaggggtgctgcgctgtgagcacaggagccagtgacacagatcagatgctgctgctgtcgtggctgccaccacaagaaacaagagtgttggagtgcaaattcattatccagctgttaagagcgacagagcatgcacacatctctccccgaccgggttatctgagagccagccctgctgtatgattgagtggctgccagcctcctcttctctgtaaccttgacacgccagagccgggcctccagtgcacaggctaaaaatcctaaaggcaacggcggcggcaacaaatagatgggttaatttgtttcatgcccccgttgtcaccaggctctcgcagaataaaaccaccaccaccaccaccacaacctccatttgtggggtttaataccccagctgctgggaatcagattcagccggaggaagaaaatgtgacgtcgatgcagagatccatttattcggtgatgtttgcttaaaaaccggtttttcatctgcaggttattcttgcacgcttggacctcaagcaacacaatatcacatttccaggtggtatctttaaggaaagctaattaagactcttggcacttgtaggatgaaacattttacaattttcttcaaagcaatttgccaacattagctaattaa

SEQ ID NO: 492 - DNA, 702 bp, Homo sapiens
  misc_feature: Incyte ID No: 287241.1
aaacaaaacgaccagtgaactcaccatccactcaggcatgtgaaaagctgaggtgccctcattaccgtcccacttctccatagtgcaggcttgggtaagatatgtcctgaagcaaaagggaaagctggtttggaaatactggggttatctgagtgccccaaagcagacccaaccctagtgagattcagaagttcacagtggctagcagaagctgcatcccttttcacagcagcctccgattcaaatcaagagcattagtcaactgcctgacaaccccttactggccggcttcaaagccttctgtgtctgatttcaaaatcagagctgatgcaaagtgctgcacccaggcactgtgcttctcacagggcactcactgttttaatgctacccaaacactctacccgcacctccccagtggggactttctgcagcaatagttggacttccttctttccctgtgtgtgaggcacttgtgaattctctcccacccttcaggacacgtcactggaggtgcggataccaagatcaataaagactgaggtcaggaaggcactcccatttctcaagagttgcttgatttggatcagtaaacaggcgtttccttgaaatcaagagctcctagggctttcaagtttaaacagctatgcagaagctccccatctgctcacaccaggggtctggcaccaaactctcgcatatctc

SEQ ID NO: 493 - DNA, 632 bp, Homo sapiens
  misc_feature: Incyte ID No: 316571.1
  unsure 432, 443, 479, 497, 521, 581, 584, 610, 617: a, t, c, g, or other
cctttatttccagataagacttctaatttaaggaaacaaacaaatatagcatctacactagcaagaatggtgatcagatatcagatgaaaagtgctgtggaagaaggaacagcctcaggcagcgatggaaatttttctgaagatgtgctgtctaaatttgatgaatggacctttattcctgactcttctatggacagtgtgtttgctcaaagtgatgacctggatagtgaaggaagtgaaggctcatttcttgtgaaaaagaaatctaattcaattagtgtaggagaattttaccgagatgccgtattacagcgttgctcaccaaatttgcaaagacattccaattccttggggcccatttttgatcatgaagatttactgaagcgaaaaaaaaaaatattatcttcagatgattcactcaggtcatcaaancttcaatcccntatgaggcattcagacagcatttcttctctggcttntgagagagaatatattanatcactagacctttcagcaaatgnactaagagatattgatgccctaagccagaaatgctgtataagtgttcatttggagcatcntgnaaagctggagcttcaccagaatgcantcacganctttccacaacagct

SEQ ID NO: 494 - DNA, 4322 bp, Homo sapiens
  misc_feature: Incyte ID No: 331447.1
tccattcaagtcactatgaaattttactcatgtagtttggaaatgcaacattttcctatcatgaaatctctttcagagaggagaatacacatcttagtccagacatttaacatgacgtgcagtttcaagtacatgtgtgtgtgttttattcaggttgtgtaatgctcccgtagattatgcgagcaagtaaatatggttagttccagagtgcaaattacagaaggaagctacttgtttaaaattccatacacgtttgcagtttcttgtacacatttggatactttgaaagatgacagattgttaaatccattcaatggtaaagaaactcaccatctggagattgagtctacttgttaatgaatgactagcccaattatccttataaattgaatatggtgaccaaatgctttgatatcatactactctgctctttgtgggcacatatgtagacactactaaaaataaatatttttggagattaaaatggagaatagaagtaattacattatttaggtcttaatccaacttttttctaatatatctaaacaattgaaagggaagcttattcatggaatattggcttgatttatctagaaagtttttccttcttcaattttactatattcattctacaggaacagcaataagtactattaaacagaagatggctacactaagttccaattttgttgctgaattgcttctgtgagttcacttttcagttctaaggaagaataatatttgctacatatttcacaggggttcttatgaaggtaaatttaccagattaataaaaatttatgaatattaaaattatcattaataatataaaacacttatttgagattaaattaaatttttcatgagcccctctttggcaggaactctgtttaattctttgtatttatcccagcttcttaaatggtggctgtaacataataaatgtttaataaatgcttatatgaatggatttttagaattaactaagaagccaaaaatggcaacaatttacagaaatcccacctttccatgcttaagacaaaaatgtcttaaatataaagctgtgattatatcaaaaatccagataaatcatcaaatatatcagattaagaccagggtttacacacttaggcaatagtcctttccaaaccatgacaaaaactacaagtttatttataatttaacaactcagctgaaaatataacgggtatatttgttattctaactctattttttaaagttaataatataaagtggccatgtaaaatattttattttccaggctaaagcaaatgaaagtttgctggtatcaacacagcctgccatatttttcacagcatgcaacaatggtgctaggatagctatttcttactgtaattgccagaggcagaaatggtctgggtataagctatttcataaaagcagctttaaattgtcagtattaaggttttcatgtggaaaggtgtcattcaaaaaaaaagtaattggcatacatattccacatcatcgatcctctctgtggtgttaatttttttatatgaccagtagaaaaattttaatattctcacaatataggttttggggcttccatatcatcaaaagactgaaaaattataattttagaattaaactgatggatttcattatagaattatctgtgagttgtgtagacacagtcttaatgtttctggttatgacagataagtttgctcaaaaaatgtggatgaagccattattgttattattgttattgcttctgttcagttgtctaagcatcatcccttctgtggcccatcacgcagcagagttgccctacaaatttcatttggcagcgccataacattcatttaaaaagtttatgaaaacattcatttgaaagttccatgcagctttagcacagagttgaccaaacactggcgtaagttcaatttacacagaatatttgaattgaaacaatagaaatttttctcataatatatacctatgtgaaaccaacttatctgcataattaaatctaatacatatttaagccagtttaagtgctttgtgttgatgcccatgcttatcaaatacatgcacaagctaaacataatttgaatgggtctatgaaggaaaaataatgcttagactttggtgtaggttcttcctgtgtagccatatacccaggctctgcagtatcgaaggatgcaaatgttgacatagatggaagctcttacctaccaaagtgtttaggaaggataaagttacatttgtcttaatttctaacattatctttgcttttatgtttcataaaaatttgtcattatttatgctggtgaaacgtataatcacatccaattatttgaacacatgcaaaataattttttaaattatgttattgtttaaatttgacttatgggagatcagtcaaaaacttagaaggtttaacacttcactgattaatggtgctgaaaacacgttacaattaccacatatccttgctataagttttgaagtttcttagcaattaaagtttttttattcagtgtgaactgtcagtatctattctggtgctaaatgtatggtgctaaatgaattgttagtgttgatggctttagtaatgctccttttattcattgctaaatttagtgttatccattcgattcctgattcagaaatatcaataaaatcctatgttaaattaatctttaccaaaaacaggcaagttaactctgttgttttaattcaacagtccaacattatttaggtgttacagagtgtaaatatatttctttgggagttattttctttttaaaatctttttatagcttggcaatgtccaaagtcaaatatcacctaaactggttagattacttctacagctaataatattgcaggcactggcgccctctggtggttatgaagacaaattcttaatggctacttgacctacagcaaaagccatttctgtaccataaaaatttgttgtgcaatattagaattatcatatgtttcctacatctgacagcacctaaaatgtttgataatattaacatgtatctaagaggaaaaaagagttaatatattctggcacccactttcctagtaatgttttccatgattttccagttctgaggcacttattaaagtgcttttttttttctgaattaattaggtattggtaaaatatatttttaaatttagttagctttataaacacaattagaattacaattaattaacagaggtataattgtctcactttcagaagtgatcatttatttttatttagcacaggtcataagaaaaatatatagaaaaataatcaatttcatatataaaaggattatttctccacctttaattattggcctatcatttgttagtgttatttggtcatattattgaactaatgtattattccattcaaagtctttctagatttaaaaatgtatgcaaaagcttaggattatatcatgtgtaactattatagataacatcctaaaccttcagtttagatatataattgactgggtgtaatctcttttgtaatctgttttgacagatttcttaaattatgttagcataatcaaggaagatttaccttgaagcactttccaaattgatactttcaaacttattttaaagcagtagaaccttttctatgaactaaatcacatgcaaaactccaacctgtagtatacataaaatggacttacttattcctctcaccttctccagtgcctaggaatattcttctctgagccctaggattgattctatcacacagagcaacattaatctaaatggtttagctccctcttttttctctaaaaacaatcagctaataaaaaaaaaatttgagggcctaaattatttcaatggttgtttgaaatattcagttcagtttgtacctgttagcagtctttcagtttgggggagaattaaatactgtgctaagctggtgcttggatacatattacagcatcttgtgttttatttgacaaacagaattttggtgccataatattttgagaattagagaagattgtgatgcatatatataaacactatttttaaaaaatatctaaatatgtctcacatatttatataatcctcaaatatactgtaccattttagatattttttaaacagattaatttggagaagttttattcattacctaattctgtggcaaaaatggtgcctctgatgttgtgatatagtattgtcagtgtgtacatatataaaacctgtgtaaacctctgtccttatgaaccataacaaatgtagctttttaaagtccattgtattgttttttctttcaataaaagagtataatt

SEQ ID NO: 495 - DNA, 851 bp, Homo sapiens
  misc_feature: Incyte ID No: 333127.1
cctttcccattgccaaaccttaggccgggcctgaggggatcagactgggcaattgaatcctcaaaggttcctggaaggactacttaggaattgaatgtgctgagacttcctctcaaaggagcccctccttcttaaatgaatccaggagagaagttctgaagactgtggtctatgctaaaggaatgcagatatttataaatggtcatctagcattgaatgaaccaagtccaaatgacaatcaaggagaactgtaaaacataggaaaagagggctgaacccatgcttccagggaaggaagaagagagagagaaagagaagagaagagagagagagagagactgacttctggaatcaatcaagggaagtctggaaatggtggatgaatggaacagaaatccccaagccaagtgtgaacaggtgacaggcctctctagggccaaggggctagactctgtagccaagcattgagcaccaaatgtgaacatgatagagttgtcagtcagaagaaactgcttgcctattgtctagtaagctgcaccttgaacaaccagctggagtggtggttctggagtagctgcctcttctggtctggaatgcatataaacaccacgaaaaaggcccagagctgggctggcaaggggtctttccctggggagagcagaccacccacaccttttgggagactactttaggctcatccaggaggccttttgatgtgtctgttatactgaagatagtgttttgaggtccccaatctttctttatgttgttggctgtcatataaaaaacaaacatcaggagagagaacaactgttttaactcaagtaatagcttaagactaaaaatgaaat

SEQ ID NO: 496 - DNA, 497 bp, Homo sapiens
  misc_feature: Incyte ID No: 334025.5
ataaattgtagtattacacagattatgacttaccctttagaagaagaagggcagatctgtaggtactaccatttatgggatgctcactatgccctgtttctcttctaaacaatttacatgtaatgtctcattcctcacaataacccttgtaaagtgggcatgattaccatgatttttatagttgaagaacctaagacacagagaccaaggcccatgagctcatagggctgaggcaggatttggaatcaggccatgtcttctccagagcccacatccatcctttctctatattgcctcccacagatgtgctaaaatttatttaactaatcctttatcctctatttgtgttgtctcccattttttattattacaatattactgtggtgaacatgcttaaaaatacattccttggatatctgacaacgtgtttctgaaaaacagattttcataagtaataataaaaataataattaaaaagttttggtatggtaaaaaaa

SEQ ID NO: 497 - DNA, 998 bp, Homo sapiens
  misc_feature: Incyte ID No: 334570.1
  unsure 204-386, 511, 548-629: a, t, c, g, or other
cacatacaaagggtaaaggagcaggttggagaagaatgaagtgcacatcaaccaaacagaagagaagcaatttggaggaggaaaaaatcagttcttcatgaaaggatcacattgatcttgatcaggaatttaggagcagcttacctaatggcacctggttacctaatggcaccctcaacagcttacctaatggcaccctcactnnnnnnnnnnnnnnnnnnnnnnnnnnnnnnnnnnnnnnnnnnnnnnnnnnnnnnnnnnnnnnnnnnnnnnnnnnnnnnnnnnnnnnnnnnnnnnnnnnnnnnnnnnnnnnnnnnnnnnnnnnnnnnnnnnnnnnnnnnnnnnnnnnnnnnnnnnnnnnnnnnnnnnnnnnnnnnnnnnnnnnngctgtgatgagagtcctcataacagggcagctggtttacccctaagcaaataatcccaagagagagaaacgcagaagccacaatgtcttttgtgacccaaccttgggagccacataccatcattnctacaatgtcctgttgcttatgcatgttggcactatnnnnnnnnnnnnnnnnnnnnnnnnnnnnnnnnnnnnnnnnnnnnnnnnnnnnnnnnnnnnnnnnnnnnnnnnnnnnnnnnnnagatgtttgacagatctagaagtcttgaaccaaaggtcgttttgtcaaatgctcttgtcattttgataataaactcagtgtcttagaggtgctaacaaaaaggttatatgtacccagaaattgaaagcggctggaattcaacttcttgagtgccatcatgtttttttcctgctacatggtttaataaagtacatataactgtgtttctataaagccgtccatcactgcagtaatctcccattacagcagattttgccacaaatttaaaagatattatttcttaccctagaaatagtttgcaaaatcatgtcattgtgctcaaggagcttgtaccatgaaattgcaacctttctgatttctcacattttc

SEQ ID NO: 498 - DNA, 426 bp, Homo sapiens
  misc_feature: Incyte ID No: 334814.1
atttattacactacccctccataaaaagcctccttttgggggtcctaatcattgtctggtgagagcatatcccagaaaactaagcatggcttgatctggaggggcccactgtgaatattaattactttgtttaaaaaaacattcaaagatataatataaaagttgaaaagccttataaaccaccgccagaagtaactgatgagaacaatttgatgtctgcttttcccaggttttaaataatcagttttcattataccaccttttcattttttgaaaagtcacactggcttaaaaacattatttttcattctgctcctttttctttctgtgttttatttttcccatgcactcataccatcccctttgttctgcaacttgttttcatttcacagtcctgcggacactcttgcctataagtgctcactc

SEQ ID NO: 499 - DNA, 707 bp, Homo sapiens
  misc_feature: Incyte ID No: 335692.1
ctcatgtgaggtgagcccccagagaaacttaaattgctggtaactgaagttgccaaaaaccaaaagttgccacgttgtcatttttaagactgtgccctgaacacacctctgcccatgcaccgtggagcatgtgttaggtgcctgccgtgggtcaggcacttgattctcaaaacactgccgagaagctcttaccaacgtgacagttgaggctgagagaggttcatgagcttgctcaaggccacgggtagtaataagaggcatggccttggtgccaagcgcctcccaaacaaacagccggggccgtggtcctgcctaaactctcacatccacggcaccacgctgggcccaggcaacagagataaggagagccctggctcttgggatggggtcgcgccgattcacatgctgtgccgcggagccccggcttccatccatgatgtgcccctgtggcgggataattgggaaacaacctttttctgattcccagagaactaatgagctgcaaaaagagattagacagggaagaattgctttcggggagaagccacttactcggctcgccttggtttttgctaacaacgtctccttaaactgctgtcaaatctttttctccctgtgtaggattcatcaatcttcgtatgcaaaagaacaccactgcactgcactgctaaaaattcacacaataaaatggactttaacttgaaaaa

SEQ ID NO: 500 - DNA, 750 bp, Homo sapiens
  misc_feature: Incyte ID No: 337407.1
  unsure 746: a, t, c, g, or other
cattaggacagtttgcggtatggcagctgtactctctttctctttttcttggttgctgtgaaggaagtcagctgccatgctgtgagcttccattgaagacagaagtcttccttctaaatgccacgtgagtgagcatggaagtcaagccatgcaatgactgtcactctggctagcaccttgattgcaatcttctgagaggccctggtccaaagtcaccctgcaaaaccaatgcccagaattactgacatatttatttcaagctaataaattataggcgtaatttgtaatatgcagaaatagataactattacgtagatcaaatgaaaagattttccaatgtgtagaaactacataaattcttttcttacaggacaatcttattctaatcaataacatttgcttttaaggcagataatcctccaagttttctaatgatatctgaaactattaactgattctgtgaattatgaaatctgaaaaggaattggaagttgctaaaaatctatcatttgcattgaccagtgtgaagcacagtggaatgagaatgcgtgccctgacaccaaagaaaaataagtgactggaaagctgaagaatcaccggcttcagtgacatggaacccagtgatttgatttttgacgagtatcgggtgactttgaggtggtcaagaaaccacactttaagaacaatgtccaaaaaggggaaaaaaaagagcaaccaaagaaaaaaaatccataaaattgcacagnagaa

SEQ ID NO: 501 - DNA, 1112 bp, Homo sapiens
  misc_feature: Incyte ID No: 337953.2
aaatagaaaaatgccaattaagctctttttcagtcttgggattgtttttgccttcagttggtagccctcaatagaaaataggtcttctgtcagcagatgttgacaacaaagaaagggaagcttttaatttgttcactaatagtgaaaaagcaaacatttacataacacaaatgtactgataaacacaattaaggatatatgcttgcctatttgtgatccaagtgttcaattaaaattatataattattgtgaaacagaggaggatgatgttcaagctatcaccgattggcctgctcttcatgtttgttaacattccggggacaaacttcaacatcaacaacctcaaattctatggcagtatccaatcctgcgtcaagcctgaatcccgggaccagacctaatcccaggaagagcaccaatcccagaatgaaccccaatcctgggataagcccagatctcaaaatgacctcgagtcccaagatgactccaaattccaagacaagtctgaatagagcagtgaccccaaagagccacaactatgaatatgaatactgtgacaaatggtagcaccaatcctgggacaagcccaaatctcaaaatgacctcaaatccctagatgactccaaattccaagacaagtctgaatacagcagtgaccccaaagatagccacaactatgaatatgaacactgtgacaaatggtagcaccatactcaatccaatggacaacatttattttctatgtaatatttttgctgttttgtgtatacttgcactcaggctgaagtgaacttcaactgcctgcattcttatctcagtttcttattattgctgaatgacaagcatgctaggaaaatatcatttatttcaatttactatttaagaaattatcatcttgatttttttttgcaaattataattgtgtacgtttaaatattaacttaatatgatgttttccttccatatgaaagaagtatgcactaccttattaaatgctgaaacaagcaaaataccatgtttgtccttttaaatgtttgcaaaactgaaccaaaactcagatatttatattaaaggtgtaagagaagaaattatgtaggtggggtgtgtgtgtg

SEQ ID NO: 502 - DNA, 283 bp, Homo sapiens
  misc_feature: Incyte ID No: 337953.5
agacgctggagaaagactgaattcttactcttcaaagaaaaatatcaaaagaggaggatgatgttcaagctatcaccgattggcctgctcttcatgtttgttaacattccggggacaaacttcaacatcaacaacctcaaattctatggcagtatccaatcctgcgtcaagcctgaatcccgggaccagacctaatcccaggaagagcaccaatcccagaatgaaccccaatcctgggataagcccagatctcaaaatgacctcgagtcccaagatgatccaa

SEQ ID NO: 503 - DNA, 2312 bp, Homo sapiens
  misc_feature: Incyte ID No: 346431.1
aacaaatcaaccttgtcctatgttaggcagctggaggcaagagtaagacagctggaggaagaaaatcgcatgctgcccaggccagccagaatagaaggcaacctccaactagaaacagctcaaatatggagaaaggctgggggtccagagcccggcgggtcttgcagtggtggcaagggtgccgaggaataggacgatgcctgcctactctcccgggttcttttaggttgtcatcaggggctgatgggagtaacagttcacccaactctgcagctagcttcagtggacatgccacaccttcccagcagcctgaacctgtggtacattctcttaaggttgtgtggaggaaacttggagatgctgcaggttcgtgtcctggaattaggcaacatttgtcaggaaaccaagtacaaaggaccaatgtgagatgcactcttttttcaaacaggagatcaccactgccagaaagtgatagaagacaagaagaagaaaaaggaaagagtgggtttccacaaacctggactcatggaataacatggagtgattgtacattgcacatatctcccctctaaaacctgtagtacaacttctcccctcaagctgatattctgtgtctctcacctcaatgtccacaacagtcaatctcaaacaaggtagctttgaaaatctcaaacagagtagctttgaaaatcaacattttggtaccagtgttttcattagaaataagtgtttttaactccccagatataatattgtaattgggcgacacctgaatagtcttaagagtgcagtggcgcctcggtgtgtttgaatatgagatagactgcattacacatgagtggtaggagtgcactaccatatcgtatagaccatctgaagaggtgatctaccacgtctatcccaagttttgagagtcgggcatggacgctcttacacttcagttcaacaaacaaactagtaattcctaatgcatatagttaagtcgcgagtgcctgataagtataaagttgctggagttccgtttcgacttctgaggtgctaaaaaatatcatgtataattctccctaccagctagaagggtagcagatgacgtagtatacgtgctaatgagacgagctaccaattaacttcaatagatgcaatataaactgtatcttttcaattttcatctgaatgagtttctcataaagatacatatgggggcataccaaccttcatattcattcagtgtatccattggtgttaatattaacaatttcaactaaaaacaacaaacataatttttctaagtgtttcgaggctgtgaggatgtcaatttctacaatttagtttctaggacatggctgtatatttaataaactttatgtaaactttaaaatattgcactgcatttatgaaaaaagctttctttgcctactgcagctatcctaacattttatgaaactgacgcatgtccttcattattgaggctaaaagctcttgttcagattgcttgaggtttgaaaaagaggtgtgctagctttgcttagtttatttcttatttttggtatacatatacatatatataacattagaatgtggtgtactggaaatgctatgataggtattttgtgttaatccaaatgcaatgatcagtttcttgtatgaatgtgcaagaggcctgtgaccgaatgctacgtttttatggtagtttaagattataaaagtagaaatgcaacaattcccagtttttgggataggttctaaatttctgagatttgattcatggcagatattctctgtttgttgttgttttagatgggctcattacataacgagttaattgtcactagtaggagactgtgtaggaattttgttatactttcaaaaatgttactgtgcatgaaaaatcatctattttcagaaaatatttatgaattaatttactatagaattatctctctaattatcataattgggttacaatttaagctccccttttaaatgttatattttaaaatgttattactctataaaagaaaattgccttgcctatatgtgacaccttcctttccctaggaaagcctttccatcccttaaattgttgtattccctaccccctgaagactatttataaatatagcttttgtgccctgcagtcagagcctgcagaagctaatacaagggacactggtcttttgacaaaataaacttgtgtaaattttgatactgtattaaaactatttttttaaagttctgcataaaattgagtattaagtatatgtgttcatcttagcaatggtaataaattatttaatctcaaaaaaaaaaaa

SEQ ID NO: 504 - DNA, 737 bp, Homo sapiens
  misc_feature: Incyte ID No: 368357.1
cacaaaggaggggtgggctgtgtgactaagcctgtgtgtggattcttacagtaagttatgtttctgagaaacaggcactaacaatagctcatttaaaaaacaaaacacaacgaaataagcaccattacaattggtgaaaaacatgtttaatcttttgcctaagaaagttttgatagcccaacataattgaaatggtggctatgcatcgttccaccctagttactcttaacggcatgttttgagtcaccaaacgtgcgtcctgctcagccttgcccaggcaactgtgaacgacagccctttccagaggacctcagaatgacaggggcatgtcacagcaccttcctttcttccaagaaatgccaggtcacagggggtgttcacttattctcaagtgacattcttgtccttaaaatatttttttcctccattatggttgtgacaattgttagcataaatattagccaagttagctgagcacatcgggtcccctgtggatattgccacttcaaagaggctcaaaagctctgaaattttatgaagaattttctcaggtttggcagatatgaaattgttgaacactgataagttgccattgttcaccttccaggtaattgtgttattttggtcttcaaggccctgtggtacttggaagcaattccttaatagtcaaacaagggcacattgccaggtttccattgtcaacgttgcagaacttactactgtttaatactttgtag

SEQ ID NO: 505 - DNA, 282 bp, Homo sapiens
  misc_feature: Incyte ID No: 390546.1
tgcctctgcgtgaccactgatgataagatttggcactcactgaaaggcagtcatcttcaccactctccgactggctcagctattgttaacttctgttgattcctgttggtggcattcctgaaaaaaaatttgtatgctggcatttggaaaattgagaaaatgtgagtggaaggtagagcaaaaacaggtagagaaagaacaattttacttcttaggggtcttgtgttctccaggatattgttgccaatgtgggaactatcagaacagtcctcggatttgatt

SEQ ID NO: 506 - DNA, 858 bp, Homo sapiens
  misc_feature: Incyte ID No: 400267.1
ggtggtacagggggaaattgcagggctgagagttaggaggtgtggattttaatcctagattcttgaaaatacctttacctttctgattagtggtatatgctgggaattctctagaggtcttgtacagctctagaattttacaattccataatctcataaatgttaataacttttattcaaccctgaaaaaggccacaactagaattataactgctattttgcaaatgattaaaactaaggcagaggacaattaagtgtttctttctgaggtcacaaagccagtaaatgttaaaactaaatgtagaactcatatctcctgactcttagttgaatgctgtttccattaggccacactgtttaggtgtttaagatacctgttgtttcttcatatctcagatttgtacatagctcagcattttcttaaaccatgattatggagacactgatcttagatggatgactgtggaaaaacggttccacagtgaaataactttggacaccattgcgtatcagttgttccctcttagaaattcagattgtactttggaatgttaaagactctgaaaaaagaaaaagctgatttaacttttttagcctacgacaccccaaaatcacattaggcacagaaggctttttgtaaagagcgtcattagcttctgagaaactagttttctgtaggacactgggaaatgtttctggttatttaaaggaaaaaaaaaagatcatgaaagttctctgaaaagtaaaatagcatcatgttaatagaattgctatacagtcatcccttagtatctgtgagggattgggtcacctgatgctcaagtcccttatatatatatataaaatggtatagttttt

SEQ ID NO: 507 - DNA, 859 bp, Homo sapiens
  misc_feature: Incyte ID No: 402288.1
  unsure 415: a, t, c, g, or other
gtatgcatacctaactttttacaggctacttagggttattattatactaattcacttaaaacacagaaaccttgcaaccctacagatccttttattctcccctcccccagagacctatactgttgatagatagtcatgcatactatacttgggcaaacgatcaccaaagaactgttatagttctcgtagtcgacaggcatgtgtgactttatagaacttagtaggaaaaactctacgtcatcccgtgtcggcctatatatttatcgtatctagtagctctttcttcattccggaagatgccgcatttgctttcagcgtaatgttgaccttcacgacttttctatgcacgatcgagtctagcgggggatacattctcttagtactacttagagaatggatttattgtacttgcatngcctaaaggatattttaggtggatatataattccgagtagatgcttgcttacttggagcacctcgaatgatgccatgtagctgtcttttcacttctctgatttctggtgaataatctttgtacatgtacaacttattcccctctgtgtggtgtgtaatttttttctagctgctttcaaaaattttttctttgtttttggttttcagcagcttaatttgatgtgtatctagtcattttctttaagtttatcctctttgaagagtactgagcttctcaaatcggtaaatttttggctttcactaagtttagaatgttttctaccattgtgtctttcttctgaccttacaaaattctagtggcaattatgataaaacttttgagatggtttcacagggcctctaactgttcagtctcccaatcaattttttttctctgtttttcaga

SEQ ID NO: 508 - DNA, 547 bp, Homo sapiens
  misc_feature: Incyte ID No: 403407.2
aaggacagcaaaagcactttactgccttagaaggaggggaggctttgccaggcctatgaaaccctcatctggatctggcctccagggcagcctcctgcctgcctctctggtgaggctcagcttctgctctgcctcaccagctcccctccagttcccctcactctgagggtgcagggagcagggtcccacgggagcattggtgtgagagggagctcccagcaccgagggagaagcaggactcactgaccaaaccatgtgtttgtgctggaagggcctcactgcaaacatgctcatcttatggaagaagaaaggaggttcagagagggaaaggcttgcctgaggtcacacggtttctggcgatgcagctggagccgggctggtggaagcagcaggccgaagtgttttagaatcttcctgaacccagcaaagggatgggtctgtcctccaagcattggggcaggggttggggggtgggcagtgggaagaaactgtggctgcttttcctgcagaagccagaaagttcgaataggagaaggaggggtagaag

SEQ ID NO: 509 - DNA, 533 bp, Homo sapiens
  misc_feature: Incyte ID No: 405447.1
  unsure 65: a, t, c, g, or other
tgttcaatgaacaagcacaagcattggaaatgctaaaattcagttttgcctcaagattggaagtntattttctgactcattcatgaagtcatctattgagccaccattcaattattcatctattaattccttgatccttcatttatccattctgcaaacttttcttgagcaccagcacgggtggccatttgtggacttctcttcattcctatgtgttttcttatcaaagtgatccactctcgaaaggctcctttccagtctgtggttgggttcaagtcatgccagggccagggggcccatctcctcgtttagctctaggcaaaatccaggggatctgcagtggggagcgggggcaggaagctggagggaaggcctgtgaagggtagggatgtggaaagacaaggtgacagaaggacccaataggacctttctatatctctggcttagcattttctacatcatattgtaatcgtcttatttgctagttttcttccttactgtgagtgactaacagtcatctttatcccagtgcc

SEQ ID NO: 510 - DNA, 3095 bp, Homo sapiens
  misc_feature: Incyte ID No: 407485.1
tagaatggaaaacatccccaaatgtatcattataaactagtcagcctgatacacaaaattgacctttaagttgcttgagaaaaacacaatgcaaatcgttcagaagggtcaacatcctttggtgctaaaatcttgtgtatgtttcagaatggctttttctgtatgttatagaataatcactaaaggaaaggtagttgaatttaaagtcatgaagcaagactctttaattcagttattttaaacaaagaattaaaaaccccaaacatccttggcaggctttgaagcacacagaattttctagtatttcttattaaatacaccaataataaacatatacttagtttacctgatgagtttagacataattctatataatgttcgcttatattcatttattaactagcaacacttgtgcaagaacaaggtattctgcttgaaaacactgatttttaagttcctgttgcccgattgtaaagaaaatcatctgacacagaagcctggattttgctctcctaacactggtgttttccttgagcctctaattcaaataaaacaaactgatacaccttacagccttattcatctgtgtctggataactcacttttcatctattgaataagaaaaagtgtttaaacttaataaaataaaaaattgtgcaccaattactacagatccttgaaacagtaagccttggattttagtcaagtaatccagttttttttaatttaacaaaaaaccatcaccttttaaagaactttaaaaacacctgtgatgccaatgtggacattgccgctgccatgtctttacacgcatgtgtcgtatagctctgtcatcgagttgaggaagtccatggtttgcaaataagggtgggggaatcaaaatttcaagatggaaaaataaaacaaatagtaaaacccatttacatgtaggaaagaaaagttgagcttcaacccaatgtgccactttgatataaaacaagtatgatatatatataaactgaagatataaaacaagtatgatcttgcctttgaaatcataaatgtttggggtacctgttctttgccagttaagatacatatcttattatctttgtttttttcaagtctatgctcctgtttgaagcttttcctgtaatttaggttgtctgtgaaatacctataacatataattcctatagagtatgccacattttttttctaactcatttcaaatgaaattctctcagattctagtttttgagcttgtccactagatctgaaaataaagcatcctttcctgagtccacttgaactaattgtgaatttgttacttaatttactggcatcttgggaaacaagttttgctgtggcaggaaggctgttttgagagtgagcgttgagtctactctggtttgtggatgacattgcattagggttatttcctgtattaccagtgcccccttgtggcaatatactttatgacttggaatgcaaacaccacttttaaaagcctgttttcaagtttttgaaaggcatttgttttctgttgtttgccaataatctgaaagtatcatgtgaaaggaattattttaaaagcattttaaacctttcccaaaggtaaaatgtgctcagattataggcacttgtaattctaaccttgtatccatttgatcaaagaaaatttgtagaacatttttacctctcatgatcacaatcattagtgtctccctttataacgacctatgttttgtttactttgaaacaccaaatttgttgtcttggttttttttacatgacagaactcatgcagtttcttttttagttgaaagttcacatcttgccccttgaatagtttgaacatttctttcttaattcttttttgtttttgttttgcactgtaaaactgatgaaaactttaagccaatcttaatgcactagcctctgtagtgtaaggaagtgtgagaaggagtttcttaatgagtttacacgtttaaatcaagcatattataagttatatgccatgtgttgaaggcttttctatttatatatataaagatttttagtatttgtttttagtgtccttgtgttgcaataatttaactcctttgactcagttgctgaaaatatttcttctattaagaagtgctcttgacttcaacacccaaacactgaaaatcatgtcaatgttacccaaagataagtttttatacagatacacaccttataagttctgatttattttcttactcattatgctgtgttctaaataaatcatgaatgagaagagtgctttattgtgaaattatttaaaactgtcctttaaaagaaaaagaggaaacgatgaacaaaaactaatctaattgccaagttagaattcattatttaatttacctcctatgcaatgattaatgctgcaaaatgtatggttatgttaccgtatattcacaaaagaaatattattacaaggtttcagaggtagccaattgcattcttttggaaatttactgtactgtttcaatgtgttaagtgccttgttgtaaagtaaaattttaagtctagattcattattttcctgacatatatttttcattatgatatctactgtatgctattgtgatagttttatgaaatgcttacattttaatcaaatatgtaaatttcagaagctcttttttcctacccaccagtaccttaatcattggtttatcacattggattcaaattcaggttccttttttgataaagaggaaatttgttttccatgcttgtgattttgtgtttgtaaacatttcaggaggaatttaggagtgtaactatagtttatacttctataatgttgtcttacatttacatttttaagtgcctaattgttaaaactgatttatgtttctcttctaaagaggatatgtgtacttggtttctaatctctttggttttgctttttaaaaaatgcaagagcctatactttgtatttacctaataaaccacagtgacatcaacagtcttttcaaaattaatattactgtttctttccatttacaaaatgtgtcatttttaaaagagttctagttttagagtacttgttaaaaccgcaagagggatattttcttcaagca

SEQ ID NO: 511 - DNA, 2377 bp, Homo sapiens
  misc_feature: Incyte ID No: 427832.19
ctaagtgtgggatatggtgtaagcatgtcatttcactctcttaatggtgtcttttggtgaaaagaagttcataatttcatgtagtccagtttatccattttgttttctatatgtttagcagttttttgtgtcctgtttagaaaatttttgcctattccaaaatcatgaaatttaagttctccacctctgttgaaattataatattaaggcagaaaagactcttcattctgatctgttggttcttagccttttgcaagtccaggatccctgtgaaaatctgactagaactctggacgccctgcacagaagtgcacctacgcacacacacagtagattttcctgcagtgttagggagttcacagacactcagacttaatctgtggaccccttgttagagaacccctcatctattccaacccagtcattttacagatacacggaaattgaggcccagggaaaggccactgttagtttgtggcccacctggaactagagtccaggtctcttgactccgattctagtgctctttctaacagatttccctgctgcagtctttctgaaaatgtctcactggcagaaccatgaaagggagaatgttttagtcaagggagatttctgtccactagcagcaacaaaaaaaaaaaatggctacatggtgacactcttctactttatgtatttaccttaaatgtttaagatccaggaactgctttttgaagttgagctgggaattatcatggcccatgcatcctcctctagctgtgactcagtgccctggggttgctatatgaacctttccatgtataactacctgtattcggcttggtcttttggttggttctggctggaattttaaaaaccaccttatataataagcttctagtctcaatgctgaagtgggtggggtttaccagagtggttgctccagggagaaaattaaaaggggtggaggcagggaaaggaactctgagtttgttgactaggttatgttggtttgcaagtagtcagctggtagacaaacgaagccagagtgtctggaagtattcattaatgattttactgctcccctgccactgtctgcagtggtcttttccaaggctctaagtggactaagcagtttacaggtaacagggccagatattttcaagccatcactcaaaccccagtgctaggcatgtccagagcgaaacctgttaccttgtcggcatgctcaccaaagtgcactgccaggggtgtgcactttacactcatagcacagatcacagtttgtgtctcacagtgaaaaagactgttcatatctttgggccacaccctgaaacacaaactgaatgatcccaccctcaacacaaaggaagttgagtccataatcgcatccacagataggatactcttagatctgacaaataacacccatttattttattccctttttcttctttcccctaagcccccggagagcctttctccagtttcatcacacactcctgactaagtagatgggggtgctagggggccagctctccgaatgaggcacatttgtcttgtcatttcaaaagctttcacagagcacctgctgtgttctgggtcctgtactaggtgacagggccacctaggtgaacagggcaaggtccctgtcctcaggaagctcccagtccaggcagaggcgtgggtgaatcggcccacacgtactgcacagtgtgttgagtgagcacagatgctgtggggccaccctgtgggtccagggaagcacttcctagagaagaaatccaaacagggattccaagtcaacgaggcagaaagtgatgggaacagcatttgtcatagtcagacaggtgcctttcacagtgacatagagacagtgaggtggggttggaatttaggcctgagagaacggggacccagtggcatacagagtcttatccttgtcctacctttttgaaagagctaaattcagaggctgccaatatgttcataactcaaaaggatcacttatcccaataacttaggaaccgttggcatccatagccctaaatcggaaaatgccgaaatcagaatcatttccccctacattgatcacagtgacctttaatcaccttcagctccctggtctcctagagccacgggtcagcccctcactgccctcctccaaagacaagtctgctcagaatgtcactgaaactctgagcatccactcaacaagcctccatcttcttactttctcatcttttctcttttaggcctgaagaagtcagtgatttatagttcactaaaactgcacaaaatgtggaaagggtggctgaggaaaacatcctgattttgcttgcttttatatatgttatgtgtagatgaataaagtgtttgatcctttttgacaaaa

SEQ ID NO: 512 - DNA, 85 bp, Homo sapiens
  misc_feature: Incyte ID No: 477913.1
  unsure 18, 45, 53, 63, 72, 77: a, t, c, g, or other
tgagatgtgtttgtaagnccaaccccctgcccacaaaaaattganctaactcnccgcctatcncaaacctanaagantaatgtaa

SEQ ID NO: 513 - DNA, 424 bp, Homo sapiens
  misc_feature: Incyte ID No: 902956.2
ctcgtccctcgggggcggcggtgcggacgcggggggtggccgggtccagaaacacgatcctttccgcctgccgcgcacggaccgcccgcatccctcgcccggcggtgggggcaccagccgagcgccccaggtttctcccttgggcctttcttcccggggctggcgagggtgcgtttggttcggaaactgcaacagatggaaaaaaggacacctccctccttccctcctccacccccgggaagaaaagcctccccgtctcgtttttgacagctgccccgaactctactggccctgctctagccgcacgagacagccgcctctgaattcaaggggcggggcacgggaggaaaagtattcgagacaagaaccaacttcttccagaatgcgcggctgccattgacacgcgggcgcggcgcggcgcacc

SEQ ID NO: 514 - DNA, 185 bp, Homo sapiens
  misc_feature: Incyte ID No: 979367.4
aatagttgctttggggtttatggatggagtggcatggtagaggttagctgaagggggcatgaaataactttttgggggtgctagagtgttgtaaatcttacagtgggggagggacaggagtgcaggcatttgacaaaacacattgaattgtgaaatttaagatttttgaatttctttgtatgtaa

SEQ ID NO: 515 - DNA, 410 bp, Homo sapiens
  misc_feature: Incyte ID No: 979367.5
  unsure 400-401: a, t, c, g, or other
gagaaaatatgcataaaacataaaaaagtgacttgattcctgattctggagtatttaagaattcctataactcaacaaaaagttcagttttttaaaatgagcaaaaggcttgggtaaactattcacaaaggaacgtagacaaatgccagtacacacatgagaagcgcatacacatccacaaacttcaaacaagcccacctcatgtatttctagtgagtaaggaaaagaacgcaaacacttttgaaaattgtttggttgtttcttgtaaatttaaacaaataccctattatattatccagcgagtccatccttaggtttttatccaaggataaagaggtgaaaactcatatctaacaaatagacttctgaaaagatgaaaatagaagctttattcatcttnnccgaagtct

SEQ ID NO: 516 - DNA, 933 bp, Homo sapiens
  misc_feature: Incyte ID No: 982861.1
  unsure 494: a, t, c, g, or other
ctttaaaaaatcgttgccaacattagagaaggtcacaaagatattttagtagctatttaaaaaaatcttttaattttaagatctatattccatatcatattgatatttacatatgggatgtgctaaaggtcaagattaattatttttctatgtgaagaatatacaatatcctcacttcttaagagatttctccattttattatctttgtcaaatatcaaatgactagatatatgtaaatctgtttctgaactttctattatcttccattagtctattcatatttgcatatatagcacacttttaattactgcaaatacataaaatgtcttgatgtcttatcgcataaacccacctctttctattttcttttgatgttttggttattcttgactgttgcttttgtttacagattttagactcagcttgccagttttcaccaaaaaactgctgagaattttattaaatatatagattattcaaaggagcactgcanagctttacaacattggaattgtgccagtatgctgaatagcaccacatattttaaattttcattgaagtataaatatatgtagaaaaatgtatatgtcatatgtgtcatgattgtttaattttcaacacactcaaaataccagcatctgtatcaagaaactgcacataaccagcatgtggtagccatgaaaatgtatttcacaaatattttaatgcaagtaaccaaagacccctattgttgtgttttaaggtcaatcctgtgtttgcatcaaggccagattttctgaaggctgctgctcccagtcaatatctgagagcagtaaggattctaaggtagacctgttcagggagacatggatcttctctgttggatagataagattgtgaatacctgactttaatggctttttctttaatataacttttctttctttttttga

SEQ ID NO: 517 - DNA, 2333 bp, Homo sapiens
  misc_feature: Incyte ID No: 983351.1
ggtatctcttaacgtataacagaccaccctcaaattgagtccttgaaacaattaccattttcttctttctcaggatttggtgcatgggatgggctcagttgggcagttcttctgttccatgtgatggtactggggctgcagtcattcagaggctcaactgggctgaacgtgcaaggtttcttgctcacgtggccatcagtggtgctggctgctgttgggagctccactggacttctgtccagagctcctcagctcacctctctgtatccttgccctgtggctcaggcttctaacaatacagaggctggattccaagaggagggaattagaagcgttcagccttcttaagaccaggattcagatgtcccagactgtcactgtattgaccggagcatttacaggccagcctagtaatttttccatcttgggcaggaatgggtggcatatgctgggggtaggggtagccttgttggggatcatctttggagctgtgtgccaaggagtaaattgctcggctgctttctacctgaggaagtccgctatgcttgcttgtggagagtggattgtgtgctcagagtccacaaggatttaagaatccgagccctgctgcccttgcctcagcctgtgcattagggcccggtggtgagagcactgagccattgtgaatcaaggcccctccctcgacctgcatactaacaggccagaagagcttgcttgattttggtcctaggctcctgcctgtgggttggattccaggggcactctctcctccacaaaccagacggtggcaggtacatcccctcaatggaaattgcccacacttcaccctaaagacagatcctgctgttcagcaacaatgtgagtggcccacacatttgtccagcatgaaaccgtttgcagattcctttccagtacacagtcccatcagccggtcacttcacgatgacagctcctcgaagcaccttttggtttgcagttgtgtagcttagaagtaggagcctgcacggcttcaggaattcacagaaggagcacactttgtgcttggagaagttaattataggaatatcctgcaacctgctgctctgagcctgtgcacctggggtgtttccctggaggtcctgtgtatgaggatactcatcagcatggggtttgggaagcctagcagtggagacaacctaggtggtcctctccaggggagtaggtaagagccctacagcagtgaaaagcattgaaggaaaagtgtgttcagcagtgctcttaatctgatcagagcagcctgaacacattctaaacacagggcatttagaactagggtagaggcactagagcaccatagatacaaactcagattctgaaggtaaatgcccaggttcaaatccaagccccctcgccaagtgaccacgactcccccgagtcacctgacctctgtgtttacatcctcaaagttaagtagtcaggaaagggggcttggggcttgccacatggatggttgccactctcctttgcaaagtgtagtccccaaaaacaggtggaagagggaagggtccaattagaaggccgagtaccagctgccatgaatatgccagagctgctggctagtgataaataactgaaacccagggggacagcagagcttgggtgaccatacattctaggaaagaaaacatgcctgttgtcctggctttttatccagcttagacaaagatgggcaaagaaaataatttagaaaatggtagagatgggcacagagaaagggcacggagggaggcacaaacagaaggccaagtgatggtggaggcagacattggagaaatgcctttacaagccggggaatgccaaggatgctggcaaccctgggagtgggaagaacctggaacacaccctccgtcagagtctccagaaggaactggcccttcatcacctttcggacttctggcctccagaactgggcaagaaaatgtttctgctgttggaggccatccagctggtggtcatttgttatggttgccacagaaaacgaatatagatttagacatctaatttgcatatatagatatgcatgtgtatttgttaaataaaagataaagcatgacagctcgatggacaacgttacaactcattaaattgtgttggttaaaaaaaatgatagatatcacccacacatttttatgtgctggcaaacagaaaaaaatctaagactacatagggttcctcttattttaattattttattcttttaaacaacaaacaatgtgactaaagcaaacagaaattattttttcatgaaacaaacagaaagggttcaatgccttaaatgatcaagcatccccaca

SEQ ID NO: 518 - DNA, 1243 bp, Homo sapiens
  misc_feature: Incyte ID No: 984637.1
  unsure 736: a, t, c, g, or other
gtagactgctagttgtttccctgaaattggcacatatccgttggcacaggctgcccagctaagactacattcccagctaggcaggccatgagaatcagtgcttgccagtggattgtgagtggaagtaatgtgtgtaacttccaccttattagcttgcaaggaatgtgcttgtccagggctacccctctgcatcctctccactagctggaatgcagactgccagcaacagcttcaactctcgatgaggacaagatgatggcatggcaagaaagaaggaagcgggggtcctgaggaacattgaggagatgagcagctccaccagcctgatggatggaactgtaactggaaagggaaatgaactgcattcttttaaaaccactatgtaacttagactttcaattcaagtatagtaatcacgtaaaaagtttcagatgtcttaagttaatagcttgctgaatttcataaactggacattctagtcatcagtacctagatgaagaagcagaacacatcaggaacccagatggtctctcatactcctctccaggcccattcgtcaaagaatttataacagcttcagtggattttacctgcttttctactttctataaatggaatcacagggtattgtggtagatggaccacagatttcttccattcctgtatgcatgaccctttgcaatgtgacttctactcagggagaggtagggtctattttcacacccttggaatctanggctggccttttgacttatggggtgaccaatagaatgcagagaaatggacacgatgaagctcctgaggctgggcccttgcaactcttgatagttacaacccttagttttaaaactttgcagcttctactttcactctcttgaaatgctgcccccagactgccgtgtaaggaaggtggtctaggccacctgggaaagaactgagcatcaccagaatgaggtcacgtgagggtacctcagaccttcccacccagccaaatctgcatctgagtgcagccttatgactcaactaaggtgaaatcagaagagaaattgcacagctatcccatcttctcatgagaagtaatctatctgttgttttaagacattaagttttgggatctatacttgttatgcagcgaaacaagtatagattagtgaaacaagtatgtactcttattttggtcaggcttctgttgctcaacacgtttgtaagattgttccatattgctgcatgtagttgaatacca

SEQ ID NO: 519 - DNA, 658 bp, Homo sapiens
  misc_feature: Incyte ID No: 984900.1
caaaactccatctcaaaaaacaaaaacacctcactgctgtttcctaagtacatacttaagaaaattgggatacatggtggtggttcatggatgttgataaggaattaaaatgtaccgtgcgactctctgtttcagtggtgacttttacctgtttagtataaatattcctttgcttccaaccataaatgtgttcttagaaatgggcctatagtttagtaacctatagtttggtaataggcttgtttgttttcagatggattttggttctgtgagctaaagctattttgcattaaagccttcgtcctcacacattgttttgacatatttctagtcttcataaacttttttaatttagatttttttcccttcacaagtatacatctgttttagcaaatagccttatgaaggttgtagatgtattattttgggcatgcctggtgatttctatattttttccaattacatttaaagctttatgttttaggaatataagtacattttatttctactttttattatatatatttaattgcacaagtactactgtctagaaaaaaatgggatgttgctaacacagcattgttggcttgtaggcagtgctgtcctgtaaatagattgaaatgtatttttatcagctggtatataaatttgaggaaag
